(19) United States
(12) Patent Application Publication
(10) Pub. No.: US 2015/0064697 A1
(43) Pub. Date: Mar. 5, 2015

(54) P53 COOPERATION WITH DNA METHYLATION AND SUICIDAL INTERFERON RESPONSE TO CONTROL SILENCING OF REPEATS AND NCRNAS

(71) Applicant: Health Research, Inc., Buffalo, NY (US)

(72) Inventors: Andrei Gudkov, East Aurora, NY (US); Yekaterina Leonova, East Aurora, NY (US)

(21) Appl. No.: 14/388,297

(22) PCT Filed: Mar. 29, 2013
(86) PCT No.: PCT/US13/34632

§ 371 Date: Sep. 26, 2014

Related U.S. Application Data
(60) Provisional application No. 61/617,394, filed on Mar. 29, 2012.

(51) Int. Cl. C12Q 1/68

(52) U.S. Cl. CPC C12Q 1/6886; C12Q 2600/154
USPC 435/6.11

(57) ABSTRACT

Provided is a disclosure of methods involving determining RNA transcripts transcribed from repeats of polynucleotide sequences, the transcription of which are normally repressed by a combination of functional p53 and DNA methylation, and methods of detecting interferon, and determining constitutive activation of an interferon type I response. The methods permit identification of cancerous or precancerous cells, can identify non-functional p53, and provide therapeutic and prophylactic approaches for cancer.

### CROSS REFERENCE TO RELATED APPLICATIONS

[0001] This application claims priority to U.S. Provisional application No. 61/617,394, filed on Mar. 29, 2012, the disclosure of which is incorporated herein by reference.

### FIELD

[0002] The present invention relates generally to detecting and treating cancer and/or pre-cancerous conditions.

### BACKGROUND

[0003] Mammalian genomes are abundant in noncoding DNA sequences whose biological function is underexplored. This portion of the genome includes DNA transposons, long-terminal repeat (LTR) retrotransposons, long interspersed nuclear elements (LINEs) and short interspersed nuclear elements (SINEs). They all are evolutionary younger than structural genes and originate from reverse transcription products of either endogenous viruses (LINEs) or certain RNA pol III-driven transcripts (SINEs)¹. These elements vary in length and copy numbers. DNA transposons are remnants of ancient elements appear throughout modern genome least frequently and it is improbable that any are transpositionally active^{2,3}. Contrariwise, LINEs, and by virtue SINEs that utilize the reverse transcriptional machinery provided by LINEs, have both shown to retain some ability to retrotranspose⁴. Additional to interspersed elements, the mammalian genome also contains tandemly organized repeats that are commonly known as satellite DNAs⁵. They are highly reiterated sequences that are the main component of the centromeric and pericentromeric heterochromatin^{6,7} and are considered important and evolutionary conserved structural elements of the chromosome⁸. Altogether, these repeats occupy more than 50% of human or mouse genome⁹.

[0004] The analysis of the genomic content of retroelements within the genomes of different mammalian species suggests that they accumulated through multiple bursts of “explosions”, where the periods of rapid amplification are followed by dormancy^{10,11}. Each act of amplification of retroelements, especially most abundant SINEs, was associated with extensive insertional mutagenesis presumably contributing to diversity of mammalian species. Explosive nature of multiplication of SINEs and the fact that they all are located in intergenic areas, pseudogenes and noncoding regions of genes suggest that their amplifications were series of genetic catastrophies associated with massive loss of those genomes which acquired inserts of SINEs inside essential genes¹². The genome contact with SINEs (and potentially other transposable elements) resembles a host-parasite coevolution, since integration of new SINE copies into coding or regulatory sequences disturbs the gene expression^{1,13}. This idea is supported by remarkable genus specificity of retroelements and chronological coincidence of their explosions with appearance of major bifurcations of mammalian evolutionary tree.

[0005] Given the abundance and genomic distribution of these elements, both their re-integration and expression could lead to detrimentally unstable conditions within the genome. It would be logical to presume that maintenance of genetic stability of current species depends on their ability to suppress amplification of tandem and dispersed repetitive elements, in general, and SINEs, in particular. In fact, these sequences are not normally actively transcribed as distinct elements but rather as integral parts of non-coding regions of larger protein-coding transcripts. SINEs are particularly abundant in introns, and many mammalian genes contain SINE copies. They also occur within the 3′-untranslated regions of the exons¹². Vast majority of SINEs are located in heavily methylated regions of DNA, which is believed to be one of the mechanisms of their epigenetic silencing¹⁴. However, in mammalian cells, DNA methylation commonly occurs as a consequence of epigenetic silencing occurring at chromatin level¹⁵. If there is such mechanism that suppresses transcription of SINEs and other retroelements, it remains unknown.

[0006] The majority of these elements is located in “deserted” regions of genome and is normally silent. However, under certain circumstances both retroelements and some classes of satellite DNA can be transcribed. Although, events underlying and triggering such activation are not well understood, they include rapid and dramatic increase in response to heat shock^{16,17}, viral infections¹⁸, various DNA damaging cell stresses^{19,20} and translational inhibition²¹; all of each have highlighted the possibility that these transcripts serve a physiological role within the organism. Additionally, transcription of both is frequently observed in tumors in a variety of models of mouse and human origin^{22,23}. Mechanisms underlying transcriptional activation of normally “silent” repeats in stressed and transformed cells and physiological consequences of this activation remain poorly understood. Therefore, there is an ongoing an unmet need for compositions and methods related to prophylaxis, therapy, diagnostics and drug discovery in the area related to activation of non-coding elements of the genome.

### SUMMARY

[0007] The present disclosure relates generally in one aspect to analyzing biological samples for the evidence of a process referred to herein as “TRAIN” which is a term we developed to represent our discovery that “transcription of repeats activates interferon.” Without intending to be constrained by any particular theory, and as described further below, it is considered that TRAIN manifests itself at least in part because of reduced or absent functional p53 activity, which may also occur with concomitant irregular DNA methylation. By “irregular” it is meant that the DNA methylation (or demethylation) of a DNA segment, such as gene segment, such as a promoter or coding region, or any other segment of DNA that affects transcription, has a methylation pattern that is typically found in a non-normal cell, such as a pre-cancerous or cancer cell, but not in non-cancer cells.

[0008] The present disclosure includes but is not necessarily limited to the discovery of massive transcription of major classes of short interspersed repeats (SINEs B1 and B2), both strands of near-centromeric satellite DNAs containing tandem repeats (major γ-satellites), and multiple species of non-coding RNAs in p53-deficient, but not in p53-wild type, mouse fibroblasts treated with the DNA demethylating agent 5-aza-2′-deoxycytidine. The abundance of these new transcripts exceeded the level of β-actin mRNA by over 150-fold. Accumulation of these transcripts, which are capable of forming double-stranded RNA, was accompanied by a strong, endogenous, apoptosis-inducing type I interferon (IFN) response. This TRAIN process was observed in spontaneous tumors in two models of cancer-prone mice, presumably reflecting naturally occurring DNA hypomethylation and p53 inactivation in cancer. These discoveries indicate that p53 and IFN cooperate to prevent accumulation of cells with activated repeats and provide an explanation for the deregulation of IFN function frequently seen in tumors.

[0009] Approaches of the present disclosure in various and non-limiting embodiments involve testing biological samples for indicia of the presence or absence of TRAIN. In embodiments, the indicia of TRAIN may include RNA transcripts transcribed from repeats of polynucleotide sequences, the transcription of which is normally repressed by a combination of functional p53 and DNA methylation, and/or constitutively active type I interferon responses. In embodiments, indicia of TRAIN can include the presence or absence of polynucleotides, or amounts of polynucleotides that are compared to a reference, wherein the polynucleotides comprise RNA polynucleotides. The RNA polynucleotides can comprise ncRNA species and/or RNA transcripts transcribed from polynucleotide sequence repeats, the transcription of which is normally suppressed by functional p53. In embodiments, the RNA polynucleotides have sequences that are described by the GenBank accession numbers shown in Tables 1 and 2 and 3, and for which each sequence associated with each GenBank accession numbers is incorporated herein by reference as of the earliest priority date of this application or patent. SEQ ID NO:s are also provided for the targets identified in Tables 1, 2 and 3. The invention also comprises detecting and/or quantitating any of the sequences disclosed herein from SEQ ID NO:276 to SEQ ID NO:351, inclusive, and including all SEQ ID NO:s there between. It will be recognized that the polynucleotide sequences associated with the GenBank accession and the SEQ ID NOs presented herein may be DNA sequences, such as cDNAs. The invention includes the RNA equivalents of all such DNA sequences, meaning the disclosure includes each DNA sequence wherein each T is substituted with a U. It will also be recognized by those skilled in the art that certain embodiments described herein were developed using murine models and therefore some polynucleotide sequences are provided as murine sequences. Additionally, to identify certain sequences that we detected as being transcribed in the absence of p53 or when p53 is non-functional (such as sequences for tandem repeats (e.g., satellites) and dispersed elements and retroelements (SINEs, IAPs, LINEs, and the like) genetic databases were queried and in some cases other mammalian and non-mammalian sequences were identified, such as some of the sequences described in SEQ ID NO:276 to SEQ ID NO:351. The invention includes the human homolog and RNA equivalent of every non-human animal DNA polynucleotide sequence presented herein. Accordingly, when reference is made to any polynucleotide sequence that is, for example an RNA transcript or the cDNA of an RNA transcript of a non-human animal, the disclosure and the claims include the cDNA and RNA transcript of the human homolog. Given the benefit of the present disclosure those skilled in the art will be able to determine the sequence of the human homolog from the non-human animal sequences presented herein.

[0010] In embodiments, the present disclosure includes approaches for detection of cancer or a pre-cancerous condition in a mammal. Such approaches can comprise detecting in a sample obtained or derived from an individual a constitutively active type I interferon response, and/or RNA transcripts transcribed from repeats of polynucleotide sequences, the transcription of which is normally repressed by a combination of functional p53 and DNA methylation.

[0011] In another aspect the present disclosure provides a method for predicting tumor sensitivity to a DNA demethylating agent by determining the absence of indicia of TRAIN.

[0012] In another aspect, the disclosure provides a method for prophylaxis and/or treatment of cancer by selective elimination of cells with inactivated p53. This aspect can comprise administering to an individual in need of the prophylaxis and/or therapy a composition comprising an effective amount of one or more agents which induce DNA demethylation. In one non-limiting embodiment, the agent is 5-aza-dC.

[0013] In another aspect, the disclosure provides a method of selection and/or identification of agents, which are capable of DNA demethylation in cells with inactivated p53. This aspect can comprise contacting cells that comprise inactivated p53 (or no p53) with one or more test agents, and determining whether or not the test agents induce activation of transcription of repeats and/or ncRNA species, which are normally suppressed by functional p53.

[0014] In another aspect, the disclosure provides a method of classification of a tumor. The method can comprise determining whether or not the tumor exhibits indicia of TRAIN, and classifying the tumor as positive or negative for indicia of TRAIN.

[0015] In another aspect, the disclosure provides a method of determination of functional status of p53 in a cell or tumor. This method can comprise determining whether or not the cell or the tumor exhibits indicia of TRAIN, wherein an absence of indicia of TRAIN indicates the p53 is functional, and wherein the presence of the indicia of TRAIN indicates the p53 is not functional.

[0016] In another aspect, the disclosure provides a method of determination of tumor sensitivity to treatment with oncolytic virus therapy by detection of indicia of TRAIN in a sample obtained or derived from an individual. An absence of indicia of TRAIN indicates tumor sensitivity, and the presence of the indicia of TRAIN indicates tumor insensitivity.

[0017] In another aspect the disclosure includes a method of determination of tumor sensitivity to interferon therapy by detection of indicia of TRAIN in the tumor, wherein the presence of the indicia of TRAIN is indicative that the tumor is likely to be sensitive to interferon therapy, and wherein the absence of the indicia of TRAIN is indicative that the tumor is likely to not be sensitive to interferon therapy.

[0018] In another aspect the disclosure includes a method of detection of TRAIN comprising using in situ hybridization techniques with oligonucleotides specific for transcripts and/or ncRNA species characteristic of TRAIN.

[0019] In another aspect the disclosure includes a method detection of TRAIN in tumors and/or normal cells and/or tissues comprising using immunohistochemical assessment of ongoing interferon signaling.

[0020] In another aspect the disclosure includes a method of screening of potentially carcinogenic substances for the ability to induce TRAIN in mammalian cells.

[0021] In another aspect the disclosure includes a method of diagnostics of aging comprising determining indicia of TRAIN in a sample of normal tissue and/or and body fluids obtained or derived from a mammal.

[0022] In another aspect the disclosure includes a method of screening and/or identification of agents suitable for treatment and/or prophylaxis of aging and/or cancer by identifying agents with selective cytotoxicity against cells with activated TRAIN. In embodiments, identifying the agents comprise contacting cells with activated TRAIN with test agents, wherein a test agent which kills cells with activated TRAIN, but does not kill cells which do not exhibit activated TRAIN, is indicated to be an agent that is suitable for treatment and/or prophylaxis of aging and/or cancer.

### SUMMARY OF THE FIGURES

[0023] FIG. 1. Primary cells deficient in functional p53 are hypersensitive to 5-aza-dC treatment. (FIG. 1A) p53-WT and p53-null MEFs were treated with 0, 5 or 10 μM 5-aza-dC for 120 hours. Viable cells were visualized by methylene blue staining. (FIG. 1B) Western blot detection of p53 and β-actin (loading control) proteins in p53-WT MEFs (lanes 1-2), p53-null MEFs (lanes 3-4), and p53-WT MEFs expressing shRNA against p53 (shp53, lanes 5-6) or the p53-inactivating genetic suppressor element-56 (GSE56, lanes 7-8) left untreated (−) or treated (+) with 500 nM doxorubicin (Dox) for 16 hours. (FIG. 1C) Cytotoxicity of 5-aza-dC in cells described in (FIG. 1B). Cells were treated with the indicated concentrations of 5-aza-dC for 5 days. Viability was determined by methylene blue staining and extraction, followed by spectrophotometric quantification. Percent viability is shown relative to control cells treated with 0.1% DMSO. Here and below, error bars show standard deviations for assays performed in triplicate. (FIG. 1D) Cytotoxicity of 5-aza-dC (5 day in vitro treatment) in primary cells from different tissues of adult p53-WT and p53-null mice was determined as in (FIG. 1C). (FIG. 1E) Caspase-3,7 activity (cleavage of the fluorescent substrate AC-Devd-AMC) in p53-WT and p53-null MEFs treated with the indicated concentrations of 5-aza-dC for 48 hours or 1 μM doxorubicin (Dox) for 16 hours. (FIG. 1F) Western blot analysis of DNA methyltransferase I (DNMT-I) and β-actin (loading control) protein levels in p53-WT and p53-null MEFs treated with the indicated concentrations of 5-aza-dC for 48 hours. (FIG. 1G) The overall extent of genomic DNA methylation in p53-WT and p53-null MEFs left untreated (U) or treated (T) with 10 μM 5-aza-dC for 48 hours was determined by digestion of DNA with the methylation-sensitive restriction enzyme McrBC which only cuts its sites that are methylated.

[0024] FIG. 2. Illumina microarray-based analysis of gene expression in p53-WT and p53-null MEFs left untreated or treated with 10 μM 5-aza-dC for 48 hours. (FIG. 2A) Middle: Venn diagram showing no overlap between the 55 and 124 genes upregulated (>5-fold) by 5-aza-dC in p53-WT and p53-null cells, respectively. Left and right panels (bar graphs): mRNA expression levels (signal intensity on Illumina microarray) of genes identified as 5-aza-dC-induced in p53-WT MEFs (left panel) or in p53-null MEFs (right panel) in all four samples (p53-WT and p53-null MEFs left untreated or treated with 5-aza-dC). (FIG. 2B) Fold-induction (log scale; 5-aza-dC-treated relative to untreated) of a subset of genes identified as 5-aza-dC-induced in either p53-WT MEFs or p53-null MEFs. Note the scale of induction of IFNβ1 in p53-null MEFs. (FIG. 2C) Validation of Illumina microarray gene expression analysis was performed by RT-PCR using independently isolated RNA from p53-WT and p53-null MEFs left untreated or treated with 10 μM 5-aza-dC for 48 hours and specific primers for mouse IFNβ1, H2-Q6, IRF7 and β-actin (control).

[0025] FIG. 3. Treatment of p53-null MEFs with 5-aza-dC induces a lethal IFN response. (FIG. 3A) Western blot detection of p53 and β-actin (loading control) proteins in MEFs from ifnar^{-/-} mice expressing endogenous WT p53 (lanes 1-2) or shRNA against p53 (shp53, lanes 3-4) or the p53-inactivating genetic suppressor element-56 (GSE56, lanes 7-8) left untreated (−) or treated (+) with 500 nM doxorubicin (Dox) for 16 hours. (FIG. 3B) Cytotoxicity of 5-aza-dC in cells differing in p53 and IFNAR status. Cells were treated with the indicated concentrations of 5-aza-dC for 5 days. Viability was determined by methylene blue staining and extraction, followed by spectrophotometric quantification. Percent viability is shown relative to control cells treated with 0.1% DMSO. (FIG. 3C) Cytotoxicity of 5-aza-dC in MEFs from ifnar^{+/+} or ifnar^{-/-} mice expressing endogenous WT p53 (transduced with a non-specific control shRNA construct) or shRNA against p53 (shp53). Cells were left untreated or treated with 10 μM 5-aza-dC for 120 hours before detection of viable cells by methylene blue staining. (FIG. 3D) Caspase-3,7 activity (cleavage of the fluorescent substrate AC-Devd-AMC) in MEFs from p53-WT, p53-null and ifnar^{-/-} mice and MEFs from ifnar^{-/-} mice expressing shRNA against p53 (shp53). Cells were treated with the indicated concentrations of 5-aza-dC for 48 hours before the caspase assay. (FIG. 3E) Western blot analysis of expression of the IFN-inducible protein p49 (and β-actin as a loading control) in SCCVII cells: intact (1), mock transfected (2), transfected with the GFP-expression construct plv-CMV-GFP (250 ng per well of a 6-well plate; used here and below for monitoring transfection efficiency) (3), transfected with plv-CMV-GFP as above together with 500 ng of RNA (rRNA-depleted fraction) from 5-aza-dC-treated p53-WT (lane 4) and p53-null MEFs (lane 5) and untreated p53-WT (lane 6) and p53-null MEFs (lane 7). Transfection of plv-CMV-GFP and double-stranded poly(I:C) RNA (1 μg, an efficient IFN-inducing agent) was used as a positive control (lane 8).

[0026] FIG. 4. Massive transcriptional upregulation of repetitive elements in p53-null MEFs treated with 5-aza-dC. The abundance of gamma-satellite (GSAT, FIG. 4A), B2 (FIG. 4B), B1 (FIG. 4C) and ncRNA (FIG. 4D) transcripts in RNA samples isolated from untreated p53-WT MEFs, 5-aza-dC-treated p53-WT MEFs, untreated p53-null MEFs, and 5-aza-dC-treated MEFs is shown on bar graphs relative to the abundance of β-actin mRNA (calculations are based on the results of total RNA sequencing) and on Northern blots. For Northern blots the positions of 18S and 28S rRNAs are indicated by arrowheads and ethidium bromide staining of the gel before transfer is shown in panel (FIG. 4A) as a common control for RNA loading and quality. (FIG. 4E) The overall abundance of RNA transcripts representing gamma-satellite DNA (“sat DNA”), SINEs (B1 and B2), ncRNAs, and ERVs (including IAPs) in the indicated cells (p53-null (KO) or p53-WT MEFs, untreated or treated with 5-aza-dC) is shown in “β-actin” units (y-axis). Pie diagrams show the proportion represented by each of the above-listed classes of RNAs in the pool of new transcripts induced by 5-aza-dC treatment in p53-null MEFs (top) and in the pool of transcripts present in untreated p53-null cells versus p53-untreated p53-WTcells (bottom) (FIG. 4F) Hypothetical scheme of formation of dsRNA by annealing of RNA-polymerase III-driven transcripts of B1 or B2 SINEs with B1 and B2 sequences present in antisense orientation in polymerase II-driven mRNAs. Introns within mRNA are spliced out before nuclear export so it is unlikely for a dsRNA to be formed by the annealing of pol III transcribed SINE sequence to SINE sequences within mRNA introns which is further recognized by pattern recognition receptors outside the nucleus, such as PKR.

[0027] FIG. 5. Structural features of major repetitive sequences that are transcriptionally repressed by p53. (FIG. 5A and (Fig. B). In FIG. 5, the B1 SINE sequence is SEQ ID NO:269; the B2 SINE sequence is SEQ ID NO:270; the Major gamma sequence is SEQ ID NO:271; the B1 sequence is SEQ ID NO:272; the B2 sequence is SEQ ID NO:273, and the GSAT sequence is SEQ ID NO:274. Comparison of putative p53-binding sites from B1, B2 and GSAT repeats with “activating” and “repressing” p53 binding consensus sequences (32). (FIG. 5C and FIG. 5D) p53 binding to its consensus sequence within a ³²P-labeled oligonucleotide was detected by electromobility shift assay (EMSA) (c, lane 1) and the specificity of the observed p53-probe complex was confirmed by supershift with the anti-p53 antibody Ab421 (lane 2). Unlabeled competitor oligonucleotides were added at 10:1, 20:1 and 40:1 molar excess over the labeled probe in lanes 3-5 (oligonucleotide containing the p53-binding consensus sequence, positive control), lanes 6-8 (an 84-bp oligonucleotide containing the first two B1-derived putative p53-binding sequences), and lanes 9-11 (a λpL promoter-derived oligonucleotides of similar length, negative control). Bands corresponding to p53-binding complexes were quantified by densitometry and normalized to free radio-labeled probe. (FIG. 5E) Relative frequency of deviations from consensus at specific nucleotides positions within putative p53-binding sites of B1 elements activated by 5-aza-dC in p53-null MEF. Mutation rates (calculated as p-values) determined for the indicated sets of nucleotides of the three putative p53-binding sites found in B1 consensus sequence. The directed minimal difference was calculated between p-values in the 5-aza-dC treated p53-KO sample versus all three samples. Analysis of each key position (highlighted in red) of the p53-binding sites within the SINE B1 revealed that the positive minimal differences (black bars) are indicative of lower mutation rates found in the treated p53-KO samples when compared to any other sample set comprising of other nucleotides from p53 recognition element (RE) (blue bars; shown only for one of four sets analyzed). (FIG. 5F) Comparison of the mutation rate in the key nucleotide positions with mutation rates in other nucleotides within putative p53-binding sites in all 4 series was performed by the voting method. For each series, the sum of squares of positive differences is chi-square distributed as well as chi-square distributed is the sum of squares of the negative differences. The first chi-square value indicates the overall voting of series' positions for lower rate of mutation in 5-aza-dC treated p53-KO. In opposite, the second chi-square value is voting for higher overall rate of mutations in the series. The ratio of these two values normalized by the corresponding degrees of freedom (numbers of positive and negative differences) is F-distributed. Shown as minus log-p-values of the F-test in key-position series (left most bar) and four control series (right four bars). The F-test p-values of lower mutation rate in the 5aza+p53ko sample across 5 series of positions are listed. Only one p-value (0.004 of the key-positions) is statistically significant.

[0028] FIG. 6. Detection of transcripts of repetitive elements in mouse tumor cell lines and spontaneous tumors. (FIG. 6A) Detection of mouse gamma-satellite (GSAT) sequences in total RNA from mouse tumor cell lines CT-26 (colon tumor), LLC-1 (Lewis-lung carcinoma), and SCC-VII (squamous cell carcinoma) left untreated or treated with 10 μM 5-aza-dC for 48 hours. Dot blotting was performed with 500 ng total RNA per dot and single-strand hybridization probes GSAT-F and GSAT-R. (FIG. 6B) Detection of IFNβ1, IRF-7, CXCL10 and β-actin (loading control) mRNA by RT-PCR in the cells described in (FIG. 6A). (FIG. 6C) Cytotoxicity of 5-aza-dC in LLC-1, CT26 and SCC-VII cells. Cells were treated with the indicated concentrations of 5-aza-dC for 5 days. Viability was determined by methylene blue staining and extraction, followed by spectrophotometric quantification. Percent viability is shown relative to control cells treated with 0.1% DMSO. (FIG. 6D) Top two panels: Gamma-satellite (GSAT) sequences were detected in total RNA from thymic lymphomas of p53-null mice (5 tumors (L1-L5) from 5 different mice assayed in duplicate) and in two normal thymuses (T4, T5) isolated from p53-null mice using dot blotting as described in (FIG. 6A). Bottom two panels: RT-PCR analysis of IFNβ1 and β-actin (loading control) mRNA expression. (FIG. 6E) Northern hybridization was used to detect SINE B1 sequences in total RNA from MMTV-her2/neu mammary tumors (8 tumors from 8 different mice). 18S and 28S rRNA levels detected by ethidium bromide staining confirmed equivalent RNA quality and loading for all tumors.

[0029] FIG. 7. Sex of the embryo does not influence sensitivity of MEF to 5-aza-dC. Embryos from uteri of several pregnant females were analyzed with similar results; results of a representative experiment are shown. MEF were genotyped to determine the sex of each individual embryo by RT-PCR (FIG. 7A). Both MEF isolated from male/female embryos were then tested to for toxicity to 5-aza-dC for 5 days. Cells were fixed and stained with methylene blue (FIG. 7B).

[0030] FIG. 8. Quiescent cells are resistant to cultivation in the presence of 5-aza-dC. Monolayer of primary mouse hepatocytes isolated from p53-wt and null liver of C57BL/6 mice were incubated with culture medium containing increasing concentration of 5-aza-dC for 5 days (time sufficient to reach complete killing of dividing p53-null hepatocytes), fixed and quantitated using methylene blue staining.

[0031] FIG. 9. 5-aza-dC treatment suppresses VSV infection in p53-null but not in p53-WT MEFs. Equally prepared cultures of p53-WT and p53-null MEFs, either left untreated or treated for 36 hours with 5-aza-dC, were infected with equivalent titers of VSV. Importantly, the virus was added at a time when there were no morphological or biochemical signs of toxicity of 5-aza-dC. The extent of viral infection was evaluated at 6 hours post-infection. Western blot analysis showed that 5-aza-dC treatment had no effect on the amount of viral P protein in p53-WT cells, but that it caused a dramatic reduction in the level of P protein in p53-null cells. Less efficient expression of viral proteins in p53-null versus p53-WT MEFs is a reproducible phenomenon which may reflect partial activation of IFN in p53-null cells prior to treatment with 5-aza-dC.

[0032] FIG. 10. Induction of transcription of intracisternal A-particles (IAPs) by 5-aza-dC. p53-WT and p53-null MEF were incubated 48 hrs in culture medium containing 10 μM of 5-aza-dC. Total RNA was isolated from these and control (untreated) MEF and the presence of IAP-specific transcripts was determined using Northern hybridization with 32P-labeled cDNA probes.

[0033] FIG. 11. Competition of 84-bp oligonucleotide containing first two B1-derived putative p53-binding sequence for p53 binding to its consensus sequence within ³²P-labeled oligonucleotide in electromobility shift assay. Unlabeled oligonucleotide of similar length with four key nucleotide positions within putative p53-binding sites replaced was used as negative control (each added in 10:1 and 15:1 molar access over labeled oligonucleotides). Specificity of observed band to p53 was proven by using anti-p53 antibodies Ab421 that caused band supershift. Densitometry-based quantitation of competition assay is shown in a right panel (density of bands corresponding to p53 were normalized to the signals from free radio-labeled probes).

### DETAILED DESCRIPTION

[0034] Mammalian genomes contain an abundance of non-coding DNA sequences as well as multiple classes of interspersed repetitive elements such as DNA transposons and retrotransposons. They vary in length and copy number, are evolutionarily younger than structural genes, and are generally considered “genomic junk” with uncertain physiological roles (1). Among these, the most abundant are short interspersed nuclear elements (SINEs) that originate from reverse transcription products of certain RNA pol III-driven transcripts (e.g., 7SL RNA and tRNAs) (2) and have been shown to retain some ability to retrotranspose (3,4). In addition, the mammalian genome also contains tandemly organized repeats known as satellite DNAs (5). These highly reiterated sequences are the main component of the centromeric and pericentromeric heterochromatin and are considered important structural elements of the chromosome (6). Altogether, these classes of non-coding DNA sequence elements occupy more than 50% of the human and mouse genomes (1).

[0035] Analysis of the phylogeny of SINEs suggests that they accumulated through multiple “explosions,” or bursts of amplification, which started about 65 million years ago and were intermitted by periods of dormancy (7,8). The explosive nature of multiplication of SINEs and the fact that they all are located predominantly in intergenic areas, pseudogenes and non-coding regions of genes suggest that their bursts of amplification were genetic catastrophes associated with massive loss of those genomes in which SINEs inserted within essential genes (2,9,10) and presumably contributed to the diversity of mammalian species. In fact, integration of new SINE copies into coding or regulatory sequences has the potential to disturb gene expression (11). Without intending to be constrained by any particular theory, that maintenance of the genetic stability of mammalian cells and organisms depends on their ability to prevent expression and amplification of SINEs. In fact, SINEs are not normally transcribed as distinct autonomous elements, but rather as integral parts of non-coding regions of larger protein-coding transcripts (2). The vast majority of SINEs are located in heavily methylated regions of DNA, which is believed to be one of the mechanisms of their epigenetic silencing (12,13).

[0036] However, under certain circumstances both retroelements and some classes of satellite DNA can be transcribed. The events triggering such activation are not well understood, but have been shown to include a variety of stresses such as heat shock (14, 15), viral infections (16), various DNA-damaging treatments (17), and inhibition of translation (14). In addition, transcription of both retroelements and satellite DNA was observed in tumors in a variety of models of mouse and human origin (18). Both the mechanisms underlying transcriptional activation of normally “silent” non-coding elements and repeats in stressed and transformed cells and the physiological consequences of this activation has heretofore remained poorly understood.

[0037] In the present disclosure, we show that tumor suppressor p53, known as a positive and negative regulator of transcription, plays a significant role, along with DNA methylation, in epigenetic silencing of classes of retroelements and satellite DNA in mice. Failure of this p53 function enables transcription of several classes of normally silent genomic DNA repeats, resulting in the induction of an interferon (IFN) response, which can be suicidal. We refer to this process as “TRAIN” which represents the discovery that “Transcription of Repeats activates INterferon”. In one embodiment which is described more fully below, we performed a high-throughput screen which revealed striking transcriptional upregulation of numerous genetic elements belonging to several classes of normally transcriptionally silent repeats and non-coding (nc) RNAs in p53-null, but not in p53-WT cells, treated with 5-aza-dC. Total abundance of new transcripts can be estimated as X % of total cellular RNA, which in various embodiments is used to detect and/or quantitate TRAIN. Transcripts which are involved with TRAIN are described in the entries in Tables 1, 2 and 3, and in SEQ ID NO:276 through SEQ ID NO:351, inclusive, and including all SEQ ID NO:s there between. The invention includes testing and/or quantitating any one, and any combination and/or sub-combination of transcripts in Tables 1, 2 and 3 SEQ ID NO:276 through SEQ ID NO:351. The invention also includes testing only any one or any such combination or sub-combination of transcripts, and thus in embodiments any transcript(s) can be excluded from being detected and/or quantitated.

[0038] The present disclosure is based in part on our observations with respect to the loss or inactivation of tumor suppressor p53 as being associated with increased cell sensitivity to DNA demethylation. These discoveries indicate that p53 and IFN cooperate through regulation of transcription and cell death, respectively, to prevent accumulation of cells with “unleashed” repeats. The present disclosure thus reveals a novel function of p53 that, in cooperation with DNA methylation, keeps large families of interspersed and tandem repeats transcriptionally dormant. In this regard, we demonstrate that treatment of p53-deficient, but not p53-WT, cells with the DNA demethylating agent 5-aza-dC was shown to cause transcriptional derepression of several classes of normally silent interspersed repeats (e.g., SINEs such as B1 and B2 repeats), tandem DNA satellites (e.g., GSAT), and non-coding RNAs (ncRNAs). Together, these elements represent a significant proportion of the mouse genome (>10%) and, when transcribed, give rise to new RNA species comparable in their abundance to the bulk of cellular mRNA.

[0039] Transcriptional derepression of repeats resulting from a combined lack of p53 function and DNA methylation was accompanied by induction of the classical type I IFN signaling pathway, which is driven in MEFs is driven by IFN-131 and leads to apoptotic cell death. The critical role played by the IFN response in death of MEFs under conditions of TRAIN was demonstrated using cells deficient in IFN receptor expression. While the precise mechanism underlying this toxicity remains to be determined, the present disclosure is consistent with evidence indicating that activation of a strong IFN response by dsRNA can result in apoptosis mediated either by induction of the pro-apoptotic Protein Kinase R (PKR) and 2′-5′-Oligoadenylate Synthetase (OAS)/RNase L pathways or activation of TRAIL/FAS death receptors (24).

[0040] In mammalian cells, IFN signaling is commonly triggered as an antiviral defense mechanism in response to dsRNA produced during viral replication (24). Our results indicate that RNA species produced following transcriptional derepression of endogenous repeats in the absence of p53 and methylation can also trigger the IFN response. Transcripts of repetitive elements, retrotransposons and satellite DNA sequences can form dsRNA due to their intense secondary structure and the presence of complementary transcripts in the cell. For SINEs, such complementary sequences exist in non-coding regions of mRNAs that were transcribed through SINEs integrated in their antisense orientation (see FIG. 4F, described in the Examples). In the case of GSAT, both strands are transcribed, thereby producing complementary RNA strands (30). We have shown that total RNA from 2-aza-dC-treated p53-null cells has stronger IFN-inducing capacity than from untreated p53-null cells as well as from both treated and untreated p53-WT cells (see FIG. 3E in the Examples). We have determined that the scale of expression of “new” transcripts that appear in p53−/− cells treated with 5-aza-dC is so strong and their copy number in the genome is so high that we believe it would preclude use of gene knockout or knockdown technique to directly assess this. Nevertheless, since transcripts of SINEs and GSAT, both of which are capable of forming dsRNAs, comprise the major proportion of new RNA synthesized in p53-null cells following DNA hypomethylation, it is highly probably that these RNA species are responsible for IFN induction.

[0041] In general, and without intending to be bound by any particular theory, the results described in this disclosure support a model in which epigenetic silencing of repeats (believed to be an essential condition for genomic stability and viability of currently existing species) is controlled by three factors: (i) p53-mediated transcriptional silencing, (ii) DNA methylation-mediated suppression of transcription, and (iii) a suicidal IFN response which eliminates cells that escape the first two lines of control. Again without intending to be constrained by theory, this is believed to present a new role for p53 as a “guardian of repeats”, which is likely a component of its function as a “guardian of the genome” (43). For example, for at least interspersed repeats (products of reverse transcription), transcription is believed to be an essential prerequisite for their amplification and subsequent possible insertional mutagenesis. Given the abundance of repeats in mammalian genomes and their potential for producing large amounts of transcripts (which in the presence of reverse transcriptase may be converted into insertional mutagens), it is reasonable to state that silencing of repeats is likely an evolutionarily important function of p53 that may have been critical for survival of predecessors of current species during times of active repeat amplification. The present disclosure is also believed to reveal a new function for the IFN response in addition to its role in antiviral innate immunity: maintenance of genomic stability through elimination of cells that have lost epigenetic silencing of interspersed and tandem repeats. While results presented in this disclosure were obtained in mice, there are numerous indications that the process we have discovered and disclosed herein for the first time as TRAIN may be universal among mammals. For example, aberrant overexpression of satellite repeats was reported in pancreatic and other epithelial human cancers (18). In addition, hypomethylation and activation of polymerase III-driven Alu (the only major SINE in the human genome) transcription was found in human tumors (44, 45). It is considered that TRAIN is likely to be the explanation for the previously described phenomenon of inhibition of growth of pancreatic tumor cells by 5-aza-dC accompanied with the induction of IFN response signaling (46).

[0042] Thus, in view of the foregoing, it will be apparent to those skilled in art that TRAIN may explain a series of previously unconnected, but well-documented properties of tumor cells, including transcription of repeats, deregulation of IFN function and increased sensitivity to lytic viruses

[0043] Based at least in part on the foregoing, the present invention provides, in one embodiment, a method for detection of cancer or a pre-cancerous condition in a mammal comprising: detecting cells in the mammal, or in a sample obtained or derived from the mammal, RNA transcripts transcribed from repeats of polynucleotide sequences, the transcription of which is normally repressed by a combination of functional p53 and DNA methylation.

[0044] In one embodiment, the detecting is performed by detection of the RNA transcripts in a sample of blood obtained or derived from the individual. Samples analyzed in the method of the invention can be any sample, including tissues, such as but not limited to biopsies, hair, biological fluids, and any other biological sample that does or would be expected to contain polynucleotides and/or cells. The biological sample may be subjected to a processing step before performing the various steps of methods provided by the invention.

[0045] In non-limiting embodiments, for the detection of any RNA transcripts disclosed herein using any embodiment or aspect of the present disclosure, the method includes identifying and/or quantitating an amount of one or more the transcripts identified herein as being involved with TRAIN. In embodiments, the amount of the transcripts can be compared to any suitable reference (i.e., a control), examples of which include but are not limited to samples obtained from individuals or cell lines which have either normal or non-functional p53, or are null-p53 controls, or are matched controls, and/or experimentally designed controls such as known input RNA used to normalize experimental data for qualitative or quantitative determination of the amounts of transcripts listed in Tables 1, 2 and 3. The reference level may also be depicted graphically as an area on a graph. In certain embodiments, determining an amount of one or a plurality of transcripts in a sample above a threshold value is indicative of TRAIN in the sample, or in the tumor or in the individual from whom the sample was obtained. Likewise, determining an amount of one or a plurality of transcripts in a sample equal to or below a threshold value is an indication that the sample did not have TRAIN. Illustrative and non-limiting threshold values are shown in Tables 1, 2 and 3. In certain embodiments, the threshold difference relative to a reference is at least a one, two, three, four, or a fivefold difference. In one embodiment, an increase of the amount of at least one transcript described in the Tables and SEQ ID NO:s herein in a sample relative to a reference by at least fivefold is an indication that the sample exhibited TRAIN. As with qualitative or quantitative determination of the amounts of transcripts by comparison with a reference, the disclosure also includes qualitative or quantitative measurement of interferon by comparison with any suitable reference.

[0046] In an embodiment, the invention provides a method for detection of cancer or a pre-cancerous condition in a mammal by detecting cells in the individual, or in a sample obtained or derived from the individual, wherein the cells are characterized by a constitutively active type I interferon response. In certain embodiments, this can be performed by detecting RNA or proteins, or a combination thereof, wherein the RNA and/or the protein is encoded by an interferon-responsive gene.

[0047] In another embodiment, the invention provides a method for predicting tumor sensitivity to 5-aza-dC treatment by determining the absence of indicia of TRAIN, wherein the indicia of TRAIN comprise: i) ncRNA species and/or RNA transcripts transcribed from polynucleotide sequence repeats, examples of which are presented in the Tables, and particularly Table 3, the transcription of which is normally suppressed by functional p53, or ii) constitutive activation of an interferon type I response; or iii) a combination of i) and ii).

[0048] In another embodiment, provided is a method for prophylaxis and/or treatment of cancer by selective elimination of cells with inactivated p53, the method comprising administering to an individual in need of the prophylaxis and/or therapy a composition comprising an effective amount of one or more agents which induce DNA demethylation. The one or more agents can be provided as a pharmaceutical preparation, which can contain a pharmaceutically acceptable carrier. The one or more agents can be delivered to an individual using any suitable method, including but not necessarily limited to oral, parenteral, subcutaneous, intraperitoneal, intrapulmonary, intranasal and intracranial injections. Parenteral infusions include intramuscular, intravenous, intraarterial, intraperitoneal, and subcutaneous administration. In certain embodiments, the method of the invention can be performed prior to, concurrently, or subsequent to conventional anti-cancer therapies, including but not limited to chemotherapies, surgical interventions, and radiation therapy. It will be recognized by those of skill in the art that the form and character of the particular dosing regimen for any composition administered to an individual according to the method of the invention will be dictated at least in part by the route of administration and other well-known variables, taking into account such factors as the size, gender, health and age of the individual to be treated. Cells/tumors with inactivated p53, and inactivated p53 itself, can be identified by the skilled artisan in view of the present disclosure.

[0049] In another embodiment, the invention provides a method of selection and/or identification of agents which are capable of DNA demethylation in cells with inactivated p53. This method comprises contacting cells with inactivated p53 with one or more test agents, and determining whether or not the test agents induce activation of transcription of repeats and/or ncRNA species which are normally suppressed by functional p53.

[0050] In another embodiment, the invention provides a method of classification of a tumor, the method comprising determining whether or not the tumor exhibits indicia of TRAIN, wherein the indicia of TRAIN comprise: i) ncRNA species and/or RNA transcripts transcribed from polynucleotide sequence repeats, the transcription of which is normally suppressed by functional p53, or: ii) constitutive activation of an interferon type I response; or iii) a combination of i) and ii).

[0051] In yet another embodiment, the invention provides a method of determination of functional status of p53 in a cell or tumor, the method comprising determining whether or not the cell or the tumor exhibits the aforementioned indicia of TRAIN. In an embodiment, the determination of functional status of p53 in a cell or tumor, or in any other sample, comprises contacting the cell and/or tumor with a demethylation agent and determining one or a plurality of the transcripts described herein, wherein a change in the amount of the one or more of the transcripts relative to a reference indicates that the p53 in the cell or tumor is non-functional.

[0052] In another embodiment, provided is a method of determination of tumor sensitivity to treatment with oncolytic virus therapy by detection of indicia of TRAIN, wherein the presence of indicia of TRAIN is indicative that the tumor is likely to be sensitive to oncolytic virus therapy. In embodiments, the method further comprises administering oncolytic virus therapy to the individual.

[0053] In another embodiment, the invention provides a method of determination of tumor sensitivity to interferon therapy by detection of indicia of TRAIN in the tumor, wherein the presence of the indicia of TRAIN is indicative that the tumor is likely to be sensitive to interferon therapy. In an embodiment, this method further comprises administering interferon therapy to the individual.

[0054] In another embodiment, the invention provides a method of detection of TRAIN comprising using in situ hybridization techniques with oligonucleotides specific for transcripts and/or ncRNA species characteristic of TRAIN. Any suitable in situ hybridization techniques can be used and will be recognized by those skilled in the art. In certain embodiment, for all aspects of the invention, the transcripts and/or ncRNA species are selected from the sequences described in Table 1 and/or Table 2 and/r Table 3, which are each designated by GenBank accession numbers, and for which each sequence associated with each entry is incorporated herein by reference as of the date of filing of this application. Table 1 describes genes upregulated five or more times in p53-WT MEF treated with 5-aza-dC compared to untreated p53-WT MEF (average signals from microarray hybridization results). Table 2 describes a list of genes upregulated five or more times in p53-null MEF treated with 5-aza-dC compared to untreated p53-null MEF (average signals from microarray hybridization results). Table 3 describes a list of ncRNAs in p53-WT and p53-null MEFs treated and untreated with 5-aza-dC based on RNA-seq analysis.

TABLE 1

| | | | p53 WT | | p53-null |
|---|---|---|---|---|---|
| Target ID | Accession No. | p53 WT | 5-aza-dC | p53-null | 5-aza-dC |
| IAP (SEQ ID NO: 1) | NM_010490.2 | 1114.7 | 14029.55 | 15715.6 | 18332.9 |
| LOC100043821 (SEQ ID | NC_00080.5 | 145.5 | 4021.55 | 4034.6 | 8040.8 |
| NO: 2) | | | | | |
| MRGPRF (SEQ ID NO: 3) | NM_145379.2 | 292.7 | 1465.2 | 1997 | 1347.9 |
| PSG23 (SEQ ID NO: 4) | NM_020261 | 9.7 | 1232.05 | 667.2 | 5114.7 |
| ZCCHC5 (SEQ ID NO: 5) | NM_199468.1 | 187.8 | 1193.45 | 1643.4 | 677.4 |
| AQP1 (SEQ ID NO: 6) | NM_007472.2 | 100.4 | 1146.25 | 1617.7 | 3771.25 |
| LOC280487 (SEQ ID NO: 7) | | 20.1 | 1052.3 | 1160.6 | 3292.7 |
| NRN1 (SEQ ID NO: 8) | NM_153529.1 | 147.2 | 998.85 | 1354.3 | 1648.6 |
| SCX (SEQ ID NO: 9) | NM_198885 3 | 150.1 | 966.8 | 1099.4 | 722.55 |
| ENO3 (SEQ ID NO: 10) | NM_007933.2 | 182.5 | 936.25 | 1076 | 1821.55 |
| LOC386135 (SEQ ID NO: 11) | | 6.8 | 810.35 | 918.2 | 2483.6 |
| RSPO2 (SEQ ID NO: 12) | NM_172815.1 | 57.7 | 788.2 | 1118.3 | 646.7 |
| ABI3BP (SEQ ID NO: 13) | NM_178790.3 | 132.5 | 695.35 | 947.9 | 622.75 |
| CXCL15 (SEQ ID NO: 14) | NM_011339.2 | 9.2 | 675.55 | 1031 | 653.7 |
| COMP (SEQ ID NO: 15) | NM_016685.2 | 7 | 478.55 | 765.8 | 737.8 |
| MND1 (SEQ ID NO: 16) | NM_029797.3 | 69 | 437.75 | 455.9 | 1365.5 |
| SLPI (SEQ ID NO: 17) | NM_011414.3 | 75.9 | 396.9 | 345 | 882.55 |
| PENK1 (SEQ ID NO: 18) | NM_001002927.2 | 4 | 382.65 | 503.5 | 559.4 |
| HOXD13 (SEQ ID NO: 19) | NM_008275.2 | 22.2 | 348.95 | 467.8 | 439.95 |
| LOC100047226 (SEQ ID | | 63.7 | 325.4 | 435.1 | 1045.5 |
| NO: 20) | | | | | |
| RHOX5 (SEQ ID NO: 21) | NM_008818.2 | 30.2 | 323.4 | 173.4 | 661.2 |
| E430033B07RIK (SEQ ID | | 29.6 | 312.95 | 132.1 | 1006.5 |
| NO: 22) | | | | | |
| AQP5 (SEQ ID NO: 23) | NM_009701.4 | 40 | 302.95 | 417.3 | 588.35 |
| BCAT2 (SEQ ID NO: 24) | NM_001243052.1 | 48.1 | 297.55 | 323.3 | 161.2 |
| SLC29A1 (SEQ ID NO: 25) | NM_022880.1 | 47.7 | 246.45 | 300.8 | 521.85 |
| LTBP4 (SEQ ID NO: 26) | NM_175641.1 | 36.4 | 244.5 | 264.2 | 326.95 |
| FMOD (SEQ ID NO: 27) | NM_021355.2 | 37 | 233.25 | 319.4 | 176.75 |
| UNC5C (SEQ ID NO: 28) | NM_152823.3 | 23.1 | 229.2 | 303.6 | 294.6 |
| ANPEP (SEQ ID NO: 29) | NM_008486.2 | 18 | 213.55 | 202.2 | 107.75 |
| MEOX1 (SEQ ID NO: 30) | NM_010791.3 | 9.2 | 211.95 | 318.2 | 122.45 |
| TBX4 (SEQ ID NO: 31) | NM_011536.2 | 30.4 | 199.7 | 262.5 | 239.55 |
| TEX19.1 (SEQ ID NO: 32) | NM_028602.2 | 11.6 | 185.55 | 168.1 | 654.9 |
| HOXA11S (SEQ ID NO: 33) | | 21.9 | 178.85 | 206.7 | 183.35 |
| MME (SEQ ID NO: 34) | NM_008604.2 | 29.9 | 171.8 | 205.2 | 243.35 |
| C1QTNF5 (SEQ ID NO: 35) | | 31.1 | 171.1 | 202.2 | 156.4 |
| MYL6B (SEQ ID NO: 36) | NM_172259.1 | 19.9 | 168.35 | 157 | 94.05 |
| HOPX (SEQ ID NO: 37) | NM_010629 | 18.3 | 158.45 | 191.1 | 407.95 |
| CDSN (SEQ ID NO: 38) | NM_001008424.2 | 18.9 | 157.85 | 243.5 | 289.2 |
| GJB3 (SEQ ID NO: 39) | NM_008126.1 | 27 | 146.95 | 128.4 | 332.05 |
| RARRES1 (SEQ ID NO: 40) | NM_001164763.1 | 26.4 | 142.1 | 161.6 | 407.1 |
| DPEP1 (SEQ ID NO: 41) | NM_007876.1 | 26 | 132.95 | 102.5 | 409.75 |
| SLC25A45 (SEQ ID NO: 42) | NM_134154.3 | 23.4 | 121.7 | 90 | 174.95 |
| HTRA3 (SEQ ID NO: 43) | NM_030127.2 | 19.4 | 119.15 | 115 | 105.85 |
| LTB4R1 (SEQ ID NO: 44) | NM_008519.2 | 15.6 | 115.2 | 69.1 | 11.9 |
| FAM132B (SEQ ID NO: 45) | NM_173395.2 | 22.1 | 113.35 | 127.1 | 162.35 |
| A030010B05RIK (SEQ ID | NM_030100 | 18.7 | 111.3 | 119.1 | 110.6 |
| NO: 46) | | | | | |
| DNM1 (SEQ ID NO: 47) | NM_010065.2 | 12.2 | 108.85 | 149 | 53.5 |
| LOC100046616 (SEQ ID | | 14.8 | 104.6 | 131.8 | 202.65 |
| NO: 48) | | | | | |
| CDA (SEQ ID NO: 49) | NM_028176.1 | 9 | 99.15 | 101.9 | 185.25 |
| EPN1 (SEQ ID NO: 50) | NM_001252454.1 | 17.6 | 98.55 | 91.5 | 51 |
| BC018371 (SEQ ID NO: 51) | | 4.6 | 98.5 | 103 | 49.15 |
| GSTP2 (SEQ ID NO: 52) | NM_181796.2 | 9.1 | 98.4 | 91.9 | 419.85 |

TABLE 2

| | | | p53-WT | | p53-null |
|---|---|---|---|---|---|
| Target ID | Accession No. | p53-WT | 5-aza-dC | p53-null | 5-aza-dC |
| IFNB1 (SEQ ID NO: 53) | NM_010510.1 | 5 | 1.3 | 0.2 | 407.85 |
| CXCL10 (SEQ ID NO: 54) | NM_021274.1 | 74.6 | 125.3 | 112.5 | 7766.4 |
| LOC432555 (SEQ ID NO: 55) | NM_001024230.2 | 0.8 | 12.65 | 11.3 | 740.95 |
| CXCL9 (SEQ ID NO: 56) | NM_008599.4 | 9.4 | 40.8 | 31.6 | 2062.95 |
| 4930438A08RIK (SEQ ID | XM_001477470.2 | 0.6 | 13.4 | 7.9 | 477.3 |
| NO: 57) | | | | | |
| EG433016 (SEQ ID NO: 58) | NM_001082547.1 | 13.2 | 5 | 2.8 | 135.45 |
| MX1 (SEQ ID NO: 59) | NM_010846.1 | 8.1 | 18.4 | 18.9 | 850.7 |
| IRGB10 (SEQ ID NO: 60) | NM_001135115.1 | 20.9 | 23.5 | 22.6 | 979.95 |
| KRT16 (SEQ ID NO: 61) | NM_008470.1 | 2.3 | 13.4 | 2.4 | 98.8 |
| POU3F1 (SEQ ID NO: 62) | NM_011141.2 | 18.4 | 3.5 | 2.7 | 110.65 |
| 9930111J21RIK (SEQ ID | NM_001114679.1 | 12.9 | 18.55 | 22 | 753.85 |
| NO:63) | | | | | |
| 2010002M12RIK (SEQ ID | NM_053217.2 | 2.1 | 3.45 | 7.6 | 248.9 |
| NO: 64) | | | | | |
| CCL4 (SEQ ID NO: 65) | NM_013652.2 | 260.9 | 45.2 | 29.1 | 573.35 |
| MX2 (SEQ ID NO: 66) | NM_013606 | 166.3 | 301.85 | 299 | 5885.7 |
| OASL1 (SEQ ID NO: 67) | NM_145209.3 | 59.1 | 100.55 | 80.6 | 1551.45 |
| CD274 (SEQ ID NO: 68) | NM_021893.3 | 117.2 | 124.2 | 91.5 | 1720.9 |
| RSAD2 (SEQ ID NO: 69) | NM_021384.3 | 405.6 | 493.3 | 509.9 | 9355.1 |
| P2RX7 (SEQ ID NO: 70) | NM_001038839.1 | 2.4 | 19.6 | 11.4 | 206.25 |
| IFI47 (SEQ ID NO: 71) | NM_008330.1 | 89.3 | 74.8 | 62.3 | 1123.75 |
| CCL5 (SEQ ID NO: 72) | NM_013653.2 | 64.7 | 106.5 | 89.6 | 1536.15 |
| 8030474K03RIK (SEQ ID | XM_001000772.2 | 1.1 | 15.3 | 6.1 | 102.55 |
| NO: 73) | | | | | |
| 3110043J09RIK (SEQ ID | NM_001164627.1 | 2.4 | 13.45 | 8 | 132 |
| NO:74) | | | | | |
| PRF1 (SEQ ID NO: 75) | NM_011073.2 | 12 | 14.9 | 7.1 | 113.55 |
| LOC100040016 (SEQ ID | NM_001085348.1 | 4.6 | 18.1 | 8.6 | 129.25 |
| NO: 76) | | | | | |
| OTTMUSG00000016644 | NM_001101605.1 | 23.3 | 32.55 | 28.2 | 418.25 |
| (SEQ ID NO: 77) | | | | | |
| LOC623121 (SEQ ID NO: 78) | NM_001177349.1 | 35.7 | 48.65 | 46.6 | 675.85 |
| RHBDL2 (SEQ ID NO: 79) | NM_183163.2 | 56.6 | 46.45 | 14.5 | 204.55 |
| AA467197 (SEQ ID NO: 80) | NM_001004174.1 | 32.6 | 119.25 | 128.9 | 1789.15 |
| ISG20 (SEQ ID NO: 81) | NM_001113527.1 | 14.2 | 42.9 | 46.1 | 628.2 |
| LOC676133 (SEQ ID NO: 82) | XR_004881.1 | 4.1 | 26.1 | 12.5 | 164.2 |
| CCRL2 (SEQ ID NO: 83) | NM_017466.4 | 16.5 | 26.25 | 19.5 | 235 |
| TYKI (SEQ ID NO: 84) | NM_020557.3 | 234.3 | 198.65 | 212.7 | 2541.75 |
| BC030476 (SEQ ID NO: 85) | NM_173421.1 | 39 | 31.05 | 15 | 178.35 |
| IFI205 (SEQ ID NO: 86) | NM_172648.3 | 39.9 | 47.45 | 45.1 | 528.2 |
| DPEP3 (SEQ ID NO: 87) | NM_027960.2 | 5.2 | 20.85 | 9.1 | 106.45 |
| CASP1 (SEQ ID NO: 88) | NM_009807.2 | 34.9 | 87.35 | 53.1 | 611.25 |
| GBP6 (SEQ ID NO: 89) | NM_145545.2 | 63 | 61.9 | 43.5 | 497.65 |
| A530057A03RIK (SEQ ID | NM_001081089.1 | 1.2 | 24 | 13.9 | 156.75 |
| NO: 90) | | | | | |
| D14ERTD668E (SEQ ID | NM_199015.2 | 184.1 | 361.85 | 365 | 3893.5 |
| NO: 91) | | | | | |
| LOC675594 (SEQ ID NO: 92) | XR_005116 | 13.2 | 29.05 | 14.6 | 153.05 |
| IL15 (SEQ ID NO: 93) | NM_008357.1 | 24.4 | 32.95 | 23.9 | 247.3 |
| SCT (SEQ ID NO: 94) | NM_011328.2 | 14 | 38.65 | 21.2 | 217.3 |
| TAF7L (SEQ ID NO: 95) | NM_028958.3 | 3.3 | 147.6 | 99.5 | 1011.15 |
| 4930599N23RIK (SEQ ID | NR_045813.1 | 11.8 | 29.65 | 21.3 | 203.65 |
| NO: 96) | | | | | |
| HAMP2 (SEQ ID NO: 97) | NM_183257.3 | 5.3 | 37.6 | 27.2 | 259.25 |
| SECTM1A (SEQ ID NO: 98) | NM_145373.2 | 8.1 | 17.75 | 11.4 | 107.05 |
| IRF7 (SEQ ID NO: 99) | NM_016850.2 | 164.1 | 260.8 | 224.4 | 2098.6 |
| C4A (SEQ ID NO: 100) | NM_011413.2 | 11.8 | 22.25 | 18.8 | 173.15 |
| NRAP (SEQ ID NO: 101) | NM_008733.3 | 13.4 | 14.5 | 11.5 | 101.2 |
| CASP4 (SEQ ID NO: 102) | NM_007609.1 | 44 | 66.4 | 60.2 | 527.45 |
| PSMB9 (SEQ ID NO: 103) | NM_013585.2 | 151.8 | 172.8 | 139.2 | 1208.7 |
| HAP1 (SEQ ID NO: 104) | NM_010404.3 | 63.6 | 25.6 | 22.7 | 190.55 |
| TRIM69 (SEQ ID NO: 105) | NM_080510.2 | 31.6 | 28.5 | 15.5 | 128.2 |
| CNKSR1 (SEQ ID NO: 106) | NM_001081047.1 | 5.6 | 12.45 | 15.6 | 128.15 |
| SASS6 (SEQ ID NO: 107) | NM_028349.2 | 89.8 | 51.8 | 31.4 | 255.8 |
| OAS2 (SEQ ID NO: 108) | NM_145227.3 | 102.7 | 140.95 | 101.4 | 814.4 |
| ARC (SEQ ID NO: 109) | NM_018790.2 | 30.8 | 86.4 | 90 | 711.05 |
| TUBA3B (SEQ ID NO: 110) | NM_009449.3 | 43.8 | 170.65 | 95.9 | 741.75 |
| WFDC12 (SEQ ID NO: 111) | NM_138684.2 | 3 | 20.55 | 23.1 | 178.45 |
| PSG23 (SEQ ID NO: 112) | NM_020261.4 | 9.7 | 1232.05 | 667.2 | 5114.7 |
| PIWIL2 (SEQ ID NO: 113) | NM_021308.1 | 14.3 | 31.4 | 27.1 | 206.25 |
| ZFP296 (SEQ ID NO: 114) | NM_022409.2 | 5.1 | 26.65 | 25.9 | 196.55 |
| LOC223672 (SEQ ID NO: 115) | NM_001162883.1 | 273.5 | 401.3 | 299.1 | 2257.4 |
| TNFAIP3 (SEQ ID NO: 116) | NM_009397.2 | 9.2 | 24.25 | 20.8 | 151.6 |
| PKD1L2 (SEQ ID NO: 117) | NM_029686.4 | 3.5 | 49.25 | 34.6 | 248.35 |
| ATF3 (SEQ ID NO: 118) | NM_007498.2 | 32.4 | 71.9 | 52.3 | 370.7 |
| ZBP1 (SEQ ID NO: 119) | NM_001139519.1 | 28.2 | 21.9 | 17 | 119.95 |
| HIST1H2AG (SEQ ID NO: 120) | NM_178186.2 | 30.4 | 46.4 | 20.1 | 141.6 |
| AI607873 (SEQ ID NO: 121) | NM_001204910.1 | 245.3 | 235.2 | 213.1 | 1497.35 |
| TUBA3A (SEQ ID NO: 122) | NM_009446.2 | 20.5 | 62.35 | 45.7 | 320.9 |
| EG240327 (SEQ ID NO: 123) | NM_001033767.3 | 256 | 146.35 | 132.5 | 909 |
| BC010462 (SEQ ID NO: 124) | BC010462 | 0.5 | 12.6 | 15.3 | 104.65 |
| IFIT2 (SEQ ID NO: 125) | NM_008332.3 | 293.3 | 411.25 | 506.1 | 3429.1 |
| GBP2 (SEQ ID NO: 126) | NM_010260.1 | 513.1 | 745.65 | 772.7 | 5218.75 |
| D630022O22RIK (SEQ ID | AK085407 | 34.4 | 23.9 | 37.4 | 248.85 |
| NO: 127) | | | | | |
| DAZL (SEQ ID NO: 128) | NM_010021.4 | 2.8 | 71.35 | 64.3 | 420 |
| LOC100047583 (SEQ ID | XM_001479138.1 | 1031 | 808.25 | 939.3 | 6057.85 |
| NO: 129) | | | | | |
| LOC383125 (SEQ ID NO: 130) | XM_356890.1 | 232.4 | 176.4 | 148 | 942.4 |
| LOC332788 (SEQ ID NO: 131) | XM_285750.4 | 75.2 | 53.25 | 50.6 | 321.35 |
| LOC268730 (SEQ ID NO: 132) | XM_193754.2 | 92.5 | 67.15 | 65.2 | 412.05 |
| LOC380839 (SEQ ID NO: 133) | XM_354746 | 0.1 | 40.15 | 29.6 | 186.9 |
| 0610037M15RIK (SEQ ID | NM_207648.1 | 21.8 | 46.3 | 30.5 | 190.4 |
| NO: 134) | | | | | |
| TRIM21 (SEQ ID NO: 135) | NM_009277.3 | 186 | 187.05 | 186.1 | 1150.9 |
| LOC229395 (SEQ ID NO: 136) | XM_130929.5 | 7.2 | 29.1 | 22.5 | 138.55 |
| SLC15A3 (SEQ ID NO: 137) | NM_023044.1 | 51.6 | 37.1 | 27.5 | 169.25 |
| DND1 (SEQ ID NO: 138) | NM_173383.2 | 11.1 | 29.7 | 16.6 | 99.95 |
| LOC386144 (SEQ ID NO: 139) | XM_359091.1 | 22.9 | 47.65 | 30.5 | 183.4 |
| LOC100047963 (SEQ ID | XM_001479238.1 | 280.8 | 252.05 | 258 | 1538.05 |
| NO: 140) | | | | | |
| ZXDA (SEQ ID NO: 141) | NR_003292.1 | 33.3 | 30.6 | 18.8 | 111.1 |
| APOL9B (SEQ ID NO: 142) | NM_001168660.1 | 73.7 | 245.5 | 229.1 | 1345 |
| LOC100041137 (SEQ ID | XR_032462.1 | 6 | 66.95 | 42.9 | 250.1 |
| NO:143) | | | | | |
| OAS1B (SEQ ID NO: 144) | NM_001083925.1 | 53.2 | 56.85 | 56.4 | 327.6 |
| CCL2 (SEQ ID NO: 145) | NM_011333.3 | 481.3 | 530.15 | 386.2 | 2231.1 |
| LOC385982 (SEQ ID | | 6.1 | 30.4 | 20.2 | 116.35 |
| NO: 146) | | | | | |
| H2-Q8 (SEQ ID NO: 147) | NM_023124.4 | 67.7 | 115.05 | 84.8 | 487.45 |
| LOC384348 (SEQ ID | | 80.7 | 68.9 | 63 | 361.95 |
| NO: 148) | | | | | |
| CYTIP (SEQ ID NO: 149) | NM_139200.4 | 8 | 19.25 | 20.4 | 117.2 |
| DCP2 (SEQ ID NO: 150) | NM_027490.1 | 99.3 | 113.6 | 104.1 | 590.8 |
| SAMHD1 (SEQ ID NO: 151) | NM_018851.2 | 139.4 | 144.55 | 139.5 | 786.45 |
| LOC667370 (SEQ ID | NM_001005858 | 873.6 | 1078.1 | 1493.2 | 8416.05 |
| NO: 152) | | | | | |
| IRF5(SEQ ID NO: 153) | NM_001252382.1 | 40.2 | 45.8 | 33.5 | 186.85 |
| APOL7A (SEQ ID NO: 154) | NM_001164640.1 | 23.6 | 99.75 | 96 | 524.9 |
| H2-Q6 (SEQ ID NO: 155) | NM_207648.1 | 13.6 | 20.25 | 18.9 | 102.4 |
| SLC11A1 (SEQ ID NO: 156) | NM_013612.1 | 57 | 62.25 | 33.7 | 181.65 |
| PARP14 (SEQ ID NO: 157) | NM_001039530.1 | 347.4 | 427.85 | 407.7 | 2172.45 |
| D11LGP2E (SEQ ID NO: 158) | NM_030150.2 | 78.2 | 126.05 | 122.1 | 649.9 |
| A1451557 (SEQ ID NO: 159) | NM_001033207.2 | 83 | 108.1 | 84.5 | 449.5 |
| DAXX (SEQ ID NO: 160) | NM_001199733.1 | 386.6 | 658.15 | 647.6 | 3422.95 |
| LOC239727 (SEQ ID | NM_181075.3 | 88.6 | 51.4 | 58.8 | 310.75 |
| NO: 161) | | | | | |
| 4930553M18RIK (SEQ ID | NM_027261.3 | 39.1 | 35 | 21.1 | 107.3 |
| NO: 162) | | | | | |
| DHX58 (SEQ ID NO: 163) | NM_030150.2 | 248 | 433.7 | 401.2 | 2035.75 |
| H2-M3 (SEQ ID NO: 164) | NM_013819.2 | 305.1 | 374.25 | 286.4 | 1451.1 |
| CDH15 (SEQ ID NO: 165) | NM_007662.2 | 31.2 | 27.5 | 23 | 116.25 |
| AIM1 (SEQ ID NO: 166) | NM_172393.2 | 18.8 | 43.65 | 37.7 | 189.85 |
| GBP3 (SEQ ID NO: 167) | NM_018734.2 | 862.7 | 1200.3 | 1332.6 | 6704.8 |
| TOR3A (SEQ ID NO: 168) | NM_023141 | 218.3 | 211.45 | 260.9 | 1312.6 |
| HIST1H2AN (SEQ ID | NM_178184.1 | 217.5 | 199.95 | 127.2 | 636.85 |
| NO: 169) | | | | | |
| CHKA (SEQ ID NO: 170) | NM_001025566.1 | 85.6 | 100.15 | 74.2 | 370.35 |

TABLE 3

| | | | p53 WT | | p53-null |
|---|---|---|---|---|---|
| Target ID | Accession No. | p53 WT | 5-aza-dC | p53-null | 5-aza-dC |
| FT312804 (SEQ ID NO: 171) | AK136884 | 1.2 | 1.2 | 1.0 | 1775.0 |
| FT314082 (SEQ ID NO: 172) | AK035603 | 14.2 | 131.0 | 17.2 | 466.0 |
| FT314729 (SEQ ID NO: 173) | AK036937 | 1.0 | 1.0 | 1.0 | 2379.0 |
| FT316398 (SEQ ID NO: 174) | AK138403 | 21.0 | 224.0 | 22.0 | 598.0 |
| FT316920 (SEQ ID NO: 175) | AK079647 | 1.0 | 1.0 | 1.0 | 618.0 |
| FT318403 (SEQ ID NO: 176) | AK041371 | 4.0 | 155.0 | 7.0 | 618.0 |
| FT318891 (SEQ ID NO: 177) | AK080354 | 9.2 | 316.0 | 11.0 | 1050.0 |
| FT318959 (SEQ ID NO: 178) | AK042254 | 13.7 | 305.0 | 15.2 | 1029.0 |
| FT319598 (SEQ ID NO: 179) | AK139172 | 8.2 | 243.0 | 10.0 | 865.0 |
| FT320180 (SEQ ID NO: 180) | AK043905 | 11.7 | 206.0 | 13.0 | 680.0 |
| FT320789 (SEQ ID NO: 181) | AK139771 | 18.5 | 243.0 | 21.0 | 756.0 |
| FT322471 (SEQ ID NO: 182) | AK140518 | 4.2 | 76.0 | 8.2 | 225.0 |
| FT32526 (SEQ ID NO: 183) | AK006721 | 993.0 | 1161.0 | 1.0 | 3349.0 |
| FT326003 (SEQ ID NO: 184) | AK050668 | 5.0 | 89.0 | 5.2 | 330.0 |
| FT326023 (SEQ ID NO: 185) | AK050666 | 5.2 | 93.0 | 8.0 | 251.0 |
| FT326254 (SEQ ID NO: 186) | AK083524 | 19.2 | 183.0 | 20.0 | 536.0 |
| FT331301 (SEQ ID NO: 187) | AK054341 | 19.2 | 211.0 | 20.2 | 657.0 |
| FT331624 (SEQ ID NO: 188) | AK153977 | 1.2 | 480.0 | 317.0 | 4249.0 |
| FT331672 (SEQ ID NO: 189) | AK088657 | 5.5 | 90.0 | 8.2 | 256.0 |
| FT331736 (SEQ ID NO: 190) | AK088947 | 4.7 | 83.0 | 7.5 | 263.0 |
| FT332042 (SEQ ID NO: 191) | AK154549 | 13.2 | 216.0 | 320.0 | 1614.0 |
| FT332332 (SEQ ID NO: 192) | AK089398 | 12.5 | 118.0 | 202.0 | 947.0 |
| FT332409 (SEQ ID NO: 193) | AK155639 | 5.2 | 69.0 | 8.2 | 208.0 |
| FT332481 (SEQ ID NO: 194) | AK089559 | 11.5 | 138.0 | 188.0 | 1096.0 |
| FT332611 (SEQ ID NO: 195) | AK171704 | 18.5 | 309.0 | 441.0 | 3087.0 |
| FT332624 (SEQ ID NO: 196) | AK171721 | 23.2 | 199.0 | 331.0 | 1604.0 |
| FT332735 (SEQ ID NO: 197) | AK089719 | 5.2 | 109.0 | 189.0 | 942.0 |
| FT332765 (SEQ ID NO: 198) | AK089731 | 7.2 | 82.0 | 144.0 | 597.0 |
| FT332798 (SEQ ID NO: 199) | AK089740 | 8.7 | 117.0 | 159.0 | 993.0 |
| FT332854 (SEQ ID NO: 200) | AK171891 | 17.2 | 247.0 | 343.0 | 2095.0 |
| FT332893 (SEQ ID NO: 201) | AK171928 | 27.4 | 351.0 | 410.0 | 2541.0 |
| FT332945 (SEQ ID NO: 202) | AK156448 | 8.5 | 99.0 | 180.0 | 841.0 |
| FT332952 (SEQ ID NO: 203) | AK171984 | 7.2 | 102.0 | 175.0 | 908.0 |
| FT332964 (SEQ ID NO: 204) | AK171993 | 11.2 | 353.0 | 15.0 | 1106.0 |
| FT333050 (SEQ ID NO: 205) | AK156533 | 12.2 | 199.0 | 157.0 | 501.0 |
| FT333068 (SEQ ID NO: 206) | AK089828 | 7.2 | 58.0 | 65.0 | 201.0 |
| FT333175 (SEQ ID NO: 207) | AK172115 | 7.2 | 96.0 | 109.0 | 586.0 |
| FT333179 (SEQ ID NO: 208) | AK172117 | 8.2 | 155.0 | 235.0 | 1310.0 |
| FT333197 (SEQ ID NO: 209) | AK156724 | 6.2 | 80.0 | 83.0 | 234.0 |
| FT333198 (SEQ ID NO: 210) | AK089889 | 4.2 | 24.0 | 57.0 | 234.0 |
| FT333211 (SEQ ID NO: 211) | AK156768 | 8.2 | 100.0 | 193.0 | 868.0 |
| FT333243 (SEQ ID NO: 212) | AK156805 | 11.2 | 151.0 | 176.0 | 1129.0 |
| FT333321 (SEQ ID NO: 213) | AK172236 | 8.0 | 37.8 | 129.0 | 413.0 |
| FT333323 (SEQ ID NO: 214) | AK172239 | 8.7 | 36.3 | 55.0 | 273.0 |
| FT333388 (SEQ ID NO: 215) | AK172311 | 9.2 | 144.0 | 181.0 | 1006.0 |
| FT333481 (SEQ ID NO: 216) | AK172445 | 4.0 | 28.4 | 45.6 | 203.0 |
| FT333657 (SEQ ID NO: 217) | AK172626 | 13.2 | 186.0 | 273.0 | 1327.0 |
| FT333902 (SEQ ID NO: 218) | AK147712 | 13.2 | 153.0 | 14.2 | 480.0 |
| FT333907 (SEQ ID NO: 219) | AK147745 | 8.7 | 303.0 | 8.7 | 1073.0 |
| FT334029 (SEQ ID NO: 220) | AK144215 | 14.7 | 220.0 | 17.2 | 701.0 |
| FT334036 (SEQ ID NO: 221) | AK090117 | 19.2 | 246.0 | 20.2 | 734.0 |
| FT334049 (SEQ ID NO: 222) | AK149633 | 7.5 | 258.0 | 10.0 | 899.0 |
| FT334695 (SEQ ID NO: 223) | AK146302 | 14.2 | 165.0 | 14.2 | 511.0 |
| FT334704 (SEQ ID NO: 224) | AK146406 | 11.2 | 186.0 | 14.2 | 637.0 |
| FT334792 (SEQ ID NO: 225) | AK146672 | 13.7 | 116.0 | 15.2 | 342.0 |
| FT34247 (SEQ ID NO: 226) | AK012536 | 9.7 | 138.0 | 15.2 | 462.0 |
| FT35741 (SEQ ID NO: 227) | AK132600 | 8.2 | 71.0 | 12.2 | 214.0 |
| FT39889 (SEQ ID NO: 228) | AK134682 | 3.2 | 82.0 | 3.7 | 300.0 |
| LIT1703 (SEQ ID NO: 229) | M63671 | 966.5 | 1357.5 | 1357.5 | 2727.8 |
| LIT1742 (SEQ ID NO: 230) | AY035343 | 3.7 | 2.3 | 4.1 | 3315.4 |
| LIT1755 (SEQ ID NO: 231) | AF323987 | 5.0 | 3.2 | 6.6 | 521.8 |
| LIT1756 (SEQ ID NO: 232) | AF357456 | 8.3 | 1.0 | 5.9 | 657.7 |
| LIT3461 (SEQ ID NO: 233) | DQ059756 | 551.1 | 451.3 | 521.8 | 2816.6 |
| RF00017 (SEQ ID NO: 234) | AC091263 | 79.7 | 150.0 | 112.5 | 365.9 |
| RF00017d (SEQ ID NO: 235) | AC127411 | 214.9 | 241.4 | 287.3 | 706.3 |

[0055] In another embodiment, the invention provides a method of detection of TRAIN in tumors and/or normal cells and/or tissues comprising using immunohistochemical assessment of ongoing interferon signaling. In one example, the ongoing interferon signaling is determined by detecting proteins encoded by interferon-responsive genes in a biological sample obtained or derived from an individual.

[0056] In another embodiment, the invention provides a method of screening of potentially carcinogenic substances for the ability to induce TRAIN in mammalian cells. In certain aspects, this comprises providing a potentially carcinogenic substance and contacting mammalian cells with the substance, wherein induction of TRAIN in the cells subsequent to being contacted by the substance is indicative that the substance is carcinogenic.

[0057] In another embodiment, a method of diagnostics of aging comprising determining indicia of TRAIN in a sample of normal tissue and/or and body fluids obtained or derived from a mammal is provided.

[0058] In another embodiment, the invention provides a method of screening and/or identification of agents suitable for treatment and/or prophylaxis of aging and/or cancer by identifying agents with selective cytotoxicity against cells with activated TRAIN. In certain examples, this comprises providing a plurality of agents for testing, and contacting cells with activated TRAIN with the agents, wherein an agent which kills cells with activated TRAIN, but does not kill cells which do not exhibit activated TRAIN, is indicated to be an agent that is suitable for treatment and/or prophylaxis of aging and/or cancer.

[0059] Kits for carrying out methods of the invention are also provided. The kits comprise one or more primers and/or probes suitable for use in detecting any combination of the transcripts described herein.

[0060] The following specific examples are provided to illustrate the invention, but are not intended to be limiting in any way.

### Example 1

[0061] This Example demonstrates that DNA demethylation can be lethal for p53-null, but is not for p53-wild type, cells.

[0062] In vitro treatment with the DNA demethylating agent 5-aza-2′-deoxycytidine (5-aza-dC) induced apoptosis in mouse embryonic fibroblasts (MEFs) lacking p53, but not in those with wild type (WT) p53. We extended this observation (FIG. 1A, C;) by showing that MEFs, irrespective of the sex of the embryo (FIG. 7A, 7B), become highly sensitive to 5-aza-dC following either shRNA-mediated knockdown of p53 or ectopic expression of a dominant negative p53 mutant, GSE56 (20) (FIG. 1B, C). The latter result indicates that sensitization to 5-aza-dC does not require physical absence of p53 but only its functional inactivation. High sensitivity to DNA demethylating agent is not limited to p53-deficient fibroblasts and is also the property of fibroblasts and epithelial cells isolated from different tissues of adult mice (FIG. 1D). This phenomenon was observed only in proliferating p53-null cells (FIG. 8) and required at least 72 hours of 5-aza-dC treatment, which reflects the time needed for the compound to fully exert its DNA demethylating activity (19). Death of 5-aza-dC-treated p53-null cells was associated with activation of caspases 3 and 7, indicating involvement of apoptosis (FIG. 1E).

[0063] A potential explanation for the observed phenomenon would be that 5-aza-dC is inefficient as a demethylating agent in cells with functional p53 due to their ability to undergo growth arrest following DNA damage (known to be caused by 5-aza-dC (19)). This possibility was ruled out by our findings of (i) complete depletion of free DNA methyltransferase I (DNMT1) protein in both p53-WT and p53-null cells after 5-aza-dC treatment (FIG. 1F), and (ii) similar degrees of DNA demethylation in the genomic DNA of p53-WT and p53-null cells following 5-aza-dC treatment as evidenced by similar patterns of DNA digestion by methylation-sensitive restriction enzyme McrBC (FIG. 1G).

[0064] In summary, sensitivity to 5-aza-dC-induced apoptosis is a common property of p53-deficient mouse cells regardless of their tissue of origin or the mechanism of p53 inactivation (knockout, knockdown or functional inactivation). This differentiates 5-aza-dC from other DNA damaging agents, which are generally more toxic to p53-WT cells (21). Indeed, doxorubicin treatment induced higher levels of caspases 3 and 7 in p53-WT than in p53-null MEFs (FIG. 1E). This suggests that the selective toxicity of 5-aza-dC to p53-null cells is likely associated with its demethylating activity rather than its DNA damaging activity.

### Example 2

[0065] This Example demonstrates that different subsets of genes are activated by 5-aza-dC in p53-null and p53-WT MEFs.

[0066] It is believed that many potentially functional genetic elements in mammalian genomes are transcriptionally repressed due to methylation of CpG dinucleotides in the vicinity of their promoters (22). Derepression of some genes regulated in this way (e.g., tumor suppressors p16, PTEN, Arf, etc.) can have a detrimental effect on cell growth or even be cytotoxic (23). Therefore, we hypothesized that the hypersensitivity of p53-null cells to 5-aza-dC-mediated might be due to activation of transcription of some “killer” genes that are normally repressed by the combined action of a DNA methylation-mediated mechanism and the trans-repressor function of p53. To identify these putative “killer” genes, we compared sets of transcripts activated by 5-aza-dC treatment in p53-WT and p53-null MEFs shortly before the onset of the toxic effect of the drug (i.e., at 48 hrs) using microarray (Illumina MouseWG-6 v2.0) hybridization-based global gene expression profiling. The results of this comparison are summarized in FIG. 2.

[0067] Treatment of p53-WT and p53-null MEFs with 5-aza-dC led to activation (by at least 5-fold) of 55 and 124 genes, respectively (Table 1 and 1). Surprisingly, there were no genes shared between these two lists (Venn diagram, FIG. 2A). To investigate the reason underlying this, we compared the basal expression levels of genes identified as 5-aza-dC-inducible in either cell line in untreated p53-WT and p53-null MEFs. This showed that for the majority of genes induced by 5-aza-dC in p53-WT MEFs, the induced level of RNA expression only reached the basal level observed in untreated p53-null cells (FIG. 2A-left panel). Therefore, in the absence of p53, these genes are not suppressed by DNA methylation, thus identifying a role for p53 as a driver of DNA methylation-mediated gene silencing.

[0068] Transcripts upregulated by 5-aza-dC treatment in p53-null cells demonstrated a completely different pattern of behavior. With a few exceptions, they all remained “silent” (expressed at low/undetectable levels) in p53-WT MEFs regardless of 5-aza-dC treatment, yet were strongly upregulated by 5-aza-dC in p53-null cells (FIG. 2A, right panel). The literature indicated that the vast majority of these genes are known transcriptional targets lying downstream of type I IFNs (IFNα and IFNβ) (Table 2). Moreover, one gene in the group with the highest degree of induction encoded mouse IFNβ1 (FIG. 2B, Table 2). The microarray results were validated using semi-quantitative RT-PCR analysis of several representative genes from the identified subsets (FIG. 2C). Taken together, these data confirm association of p53 deficiency with (i) lack of silencing (high basal expression) of genes that are transcribed in p53-WT cells only after 5-aza-dC treatment, and (ii) induction of a strong IFN response by 5-aza-dC.

### Example 3

[0069] This Example demonstrates that DNA demethylation in p53-null cells triggers a lethal IFN response.

[0070] Production of type I IFNs is a major anti-viral response that limits the infectivity of a wide range of DNA and RNA viruses (24). In addition to this major function, type I IFNs are also involved in complex interactions with a wide range of biological outcomes, including cytostatic and cytotoxic effects (24). Therefore, since 5-aza-dC induced a strong IFN response in p53-null cells (but not p53-wt), we set out to test the functionality of the induced IFN response and determine whether it is involved in the hypersensitivity of p53-null cells to the drug.

[0071] As a measure of the functionality of the IFN response, we assessed the ability of MEFs to support infection with an IFN-sensitive virus, vesicular stomatitis virus (25) (VSV). Treatment with 5-aza-dC strongly repressed virus replication only in p53-null cells (FIG. 9), thus confirming the functionality of the IFN response in these cells.

[0072] To determine whether the 5-aza-dC-induced IFN response plays a role in the toxicity of the drug towards p53-null cells, we used MEFs from IFN receptor 1 (ifnar) knockout mice (26), which are incapable of developing a type I IFN response. We introduced into these cells the constructs described above that either knockdown (shRNA) or inactivate (GSE56) p53 (FIG. 3A). While these methods of eliminating p53 activity made p53-WT MEFs with intact IFNAR sensitive to 5-aza-dC-mediated killing, they did not sensitize p53-WT, ifnar^{-/-} MEFs (FIG. 3B, C). No signs of caspase activation were detected in ifnar^{-/-} MEFs treated with 5-aza-dC (FIG. 3D). These observations suggest that the IFN response is a major mediator of death induced by 5-aza-dC in p53-deficient cells.

[0073] Since DNA demethylation is expected to induce new transcripts and IFN response can be triggered by virus-like (i.e. double-stranded) RNA species, we tested the IFN-inducing capacity of RNA isolated from p53-WT and p53-null cells, untreated or treated with 5-aza-dC. After removal of rRNA (to reduce high background levels of abundant and largely double-stranded and abundant RNA species) RNA samples were then transfected into SCCVII cells (a mouse head-and-neck cancer-derived cell line known to retain normal type I IFN response) and expression of the IFN-responsive protein p49 (27) was evaluated by Western blotting. Transfection of RNA isolated from 5-aza-dC-treated p53-null cells resulted in dramatically higher induction of p49 expression as compared to RNA from 5-aza-dC-treated p53-WT cells or untreated cells of either genotype (FIG. 3E). This result suggests the presence of an IFN-inducing RNA species specifically in p53-null cells with reduced DNA methylation.

### Example 4

[0074] This Example demonstrates massive transcription of repetitive elements in p53-null cells treated with 5-aza-dC.

[0075] IFN responses are normally triggered by double-stranded RNA (dsRNA) interpreted by the cell as an indication of viral infection (24). The gene expression profiling that we performed using the Illumina mousewG-6 v2.0 microarray assayed only protein-coding mRNA transcripts and did not reveal any candidate triggers for the suicidal IFN response observed in 5-aza-dC-treated p53-null cells. Therefore, we used a high-throughput RNA sequencing technique to build a comprehensive unbiased picture of RNA species induced by 5-aza-dC treatment. Total RNA was isolated from p53-WT and p53-null MEFs left untreated or treated for 48 hours with 5-aza-dC. After depletion of rRNA, the RNA samples were fragmented, converted to double-stranded cDNA using random primers, ligated with adaptors, and sequenced using a HiSeq2000 instrument (Illumina) with approximately 80×10⁶ 50-nucleotide reads per sample.

[0076] The sequencing results were analyzed by assigning individual cDNA sequences to specific entries in mammalian genome databases that include, besides protein-coding transcripts, functional RNA species (rRNA, snRNA, tRNA, etc.), RNAs transcribed from various classes of repeats, and non-coding RNAs (28). The majority of database entries were equally represented among the four RNA samples; however, three types of RNA transcripts were specifically and significantly more abundant in the RNA sample from 5-aza-dC-treated p53-null MEFs. These included: (i) both major classes of mouse SINEs, namely B1 and B2 (FIG. 4B, C) (ii) near-centromeric major (gamma) satellite repeats (GSAT) (FIG. 4A), and (iii) a large number of different non-coding RNA species (ncRNAs) (FIG. 4D and Table 3). Importantly, we also identified repeats and ncRNAs that were induced in both p53-WT and p53-null MEFs upon treatment with 5-aza-dC, albeit to a greater extent in p53-null cells. These transcripts apparently represent cases of methylation-based silencing that only partially depends on p53 and included, for example, transcripts of endogenous retrotransposons such as intracisternal A-particles (IAP) (FIG. 10), “primitive” relatives of retroviruses present in mouse genomes at about 10,000 copies (29). All of these observations were confirmed using Northern blot hybridization with independently isolated RNA samples from untreated and 5-aza-dC-treated p53-WT and p53-null MEFs (FIG. 4A-D and FIG. 10).

[0077] Northern blotting demonstrated that both 5-aza-dC-treated and untreated p53-WT cells as well as untreated p53-null cells expressed sequences corresponding to B1 SINE predominantly within large RNA transcripts, while RNA corresponding to individually transcribed B1 elements (116 bp long RNA-polymerase III-driven transcript) was barely detectable (FIG. 4C). However, in the sample from 5-aza-dC-treated p53-null MEFs, the most intense signal was concentrated in the size range of single-element transcripts, thus indicating that DNA demethylation in the absence of p53 results in strong activation of transcription of B1 and B2 elements. Annealing of these induced monomeric positive strands of B1 and B2 transcripts to antisense-oriented B1 and B2 sequences present in the untranslated regions of numerous protein-coding mRNAs can be predicted to create a large pool of dsRNA potentially capable of triggering an IFN response (FIG. 4F).

[0078] In contrast to SINEs, transcripts of GSAT sequences vary in length from 240 bp to more than 10 kb (see Northern blot in FIG. 4A). Detection of GSAT transcripts can be revealed by radiolabeled probes representing both positive and negative strands of GSAT DNA (FIG. 6A, D) indicative of bi-directional transcription. This is consistent with previous reports in which temporary activation of GSAT transcription and appearance of dsRNA of various lengths was observed during specific stages of embryonic development (30) and in the hearts of old adult mice (31). dsRNA formed by annealed complementary GSAT RNA strands could trigger IFN induction.

[0079] To gain an appreciation of the potential biological impact of the identified 5-aza-dC-induced transcripts in p53-null MEFs, we estimated their overall abundance vis-à-vis the abundance of mRNAs for β-actin, a highly expressed transcript commonly used as a reference in gene expression studies. We calculated the relative representation of RNAs transcribed from SINEs (B1 and B2), satellite DNA (GSAT and SATMIN), IAPs and ncRNAs in each sample based on the proportion of their corresponding sequences in RNA samples used for high throughput sequencing. The results shown in FIG. 4E demonstrate that the amount of new RNA (counted as numbers of monomeric copies) synthesized specifically in p53-null cells following treatment with 5-aza-dC was more than 150 times greater than the level of β-actin mRNA. Two-thirds of this new pool of RNA was comprised of transcripts of SINEs and satellite DNA in near equal proportions and the remaining one-third consisted of equal proportions of IAP transcripts and ncRNAs. Interestingly, however, IAPs were not among the RNA species that showed differential expression between untreated p53-null and untreated p53-WT MEFs, thus suggesting that their DNA methylation-based silencing is not strictly p53-dependent.

### Example 6

[0080] This Example demonstrates structural properties of major classes of p53-controlled repeats.

[0081] Reconstruction of the phylogenetic history of SINEs suggests that their amplification in mammalian genomes started about 65 million years ago and involved a series of “explosions” that created subfamilies of repeats each with shared mutations (9, 12, 32). To determine whether B1 and B2 transcription initiated by DNA hypomethylation in p53-null cells involved random or specific subsets of repeats, we calculated deviation from the consensus SINE sequence (built by analyzing the entire SINE family in the mouse genome) for each nucleotide position of the B1 and B2 sequences identified in sequencing of our four RNA samples (p53-WT and p53-null MEFs, untreated and 5-aza-dC-treated). No major differences were found in the profiles of nucleotide polymorphisms along B1 and B2 transcripts among all four samples indicative of roughly random activation of transcription of different subsets of SINEs in p53-null cells treated with 5-aza-dC (correlation coefficients>0.96). However, more precise analysis revealed significant shifts in frequencies of mutations in a number of positions in B1 transcripts in the latter RNA sample versus three others. Interestingly, nucleotide substitutions were significantly less frequent in specific positions within putative p53-binding sequences (see FIG. 5E, F).

[0082] p53 is known as a repressor of transcription acting via recognition of specific sequences that are similar to those that serve as p53 binding sites in p53-induced genes (33, 34). A search for putative p53 binding-like sites revealed a series of candidate sequences in B1, B2 and GSAT elements (FIG. 5A, B). GSAT elements were found to be especially enriched with potential p53-binding sequences. The functionality of predicted p53 binding sites was tested using EMSA with synthetic oligonucleotides representing different B1 fragments incubated with nuclear extracts of mouse cells known to have wild type and functional p53. While the oligonucleotides used did not show stable binding with p53 under the applied conditions, they nevertheless were capable of inhibiting p53 binding to a control oligonucleotide containing a consensus p53-binding site (FIG. 5 C, D). This inhibition was dependent on the presence of intact putative p53 binding sites in B1-derived oligonucleotides since point mutations at key nucleotides of the p53-binding sequence completely abrogated the ability of oligonucleotide to compete for p53 binding (FIG. 11). Remarkably, the mutation frequencies in these particular nucleotides were less frequent than in the rest of the positions within p53-binding sites of new B1 transcripts induced by 5-aza-dC treatment (FIG. 5E, F). These observations suggest that B1 repeats are capable of specific p53 binding, albeit with low affinity, and this binding is required for their transcriptional repression by p53.

### Example 7

[0083] This Example demonstrates that transcription of repeats and ncRNAs can occur in tumors.

[0084] p53 is the most frequently mutated gene in tumors. However, even in tumors that retain wild type p53 gene sequences, p53 is commonly inactivated by other means (e.g., viral protein expression, overexpression of the natural p53 inhibitor mdm2, loss of Arf (35)). Hence, we hypothesized that tumor cells might be prone to induction of transcription of repeats and ncRNAs following 5-aza-dC treatment as was observed in p53-null MEFs. To test this hypothesis, we chose three mouse tumor-derived cell lines (SCC-VII, CT26, and LLC) without significant levels of basal repetitive element transcription (as illustrated by low levels of GSAT transcripts, FIG. 6A). Upon treatment with 5-aza-dC, we found that SCC-VII, CT26 and LLC cells showed strong, intermediate and undetectable expression of GSAT RNA, respectively (FIG. 6A). In addition, we detected strong upregulation of the mRNAs encoding IFNβ1 and its downstream responsive genes IFN regulatory factor 7 (IRF7) and CXCL10 in 5-aza-dC treated SCC-VII cells and, to a somewhat lesser extent, 5-aza-dC treated CT26 cells (FIG. 6B). In contrast, none of these IFN response-associated transcripts was detected in 5-aza-dC-treated LLC cells. Consistent with these findings, SCC-VII cells were the most 5-aza-dC-sensitive cell line (LD50=0.125 μM), CT26 cells showed intermediate sensitivity (LD50=2 μM), and LLC cells were the least sensitive (LD50=14 μM) (FIG. 6C). The identified positive correlation between transcription of repeats, induction of an IFN response, and sensitivity to 5-aza-dC supports our model of tumors with reduced p53 function (36, 37, 38) being prone to activation of transcription of repeats under conditions of reduced DNA methylation. These results suggest that the sensitivity of tumor cells with silent repeats to 5-aza-dC (drug Decitabine approved for treatment of myelodysplastic syndrome and considered for anticancer use) may depend on whether they have functional p53 or not.

[0085] Decreased genome-wide DNA methylation is another common property of tumors acquired during in vivo growth (39). Together with inactivation of p53, this could create conditions sufficient to induce transcription of repeats and ncRNAs normally suppressed by a combination of p53 and DNA methylation. Therefore, we hypothesized that transcription of repeats leading to induction of an IFN response might occur spontaneously during tumor growth and progression in vivo. We tested this hypothesis in two mouse tumor models. First, we showed that all tested spontaneous thymic lymphomas, the most frequent tumors to develop in cancer-prone p53-null mice (40), contained much higher levels of repetitive element transcripts than normal tissues of p53-null mice, including thymuses of p53-null mice prior to lymphoma development (FIG. 6D, shown for GSAT RNA transcribed from both DNA strands). As in p53-null MEFs treated with 5-aza-dC, activation of transcription of repeats correlated with the induction of IFN response, as demonstrated by RT-PCR results (FIG. 6D).

[0086] Similarly, repetitive element expression was observed in more than half (6/8) of the mammary gland tumors that developed spontaneously in untreated MMTV-her2/neu transgenic mice (41) (FIG. 6D). Previous reports indicate acquisition of missense mutations in at least 37% of these tumors (42). Note that while expression of only one specific class of repeats is shown for each of the above cases, activation of GSAT, B1 and B2 always occurred together. Our finding that growing tumors express high levels of repeats capable of generating dsRNA and subsequently inducing a lethal IFN response suggest that such tumors have successfully passed through selection for resistance to endogenous IFN toxicity.

### CITATIONS FOR EXAMPLE 1-7

[0087] 1. Makalowski W (2000) Genomic scrap yard: how genomes utilize all that junk. Gene 259:61-67.
[0088] 2. Kramerov D A, Vassetzky N S (2011) SINEs. Wiley Interdiscip Rev RNA 2:772-786.
[0089] 3. Smit A F (1999) Interspersed repeats and other mementos of transposable elements in mammalian genomes. Curr Opin Genetics Dev 9:657-663.
[0090] 4. Ostertag E M, Kazazian H H Jr (2001) Biology of Mammalian L1 Retrotransposons. Annu Rev Genet 35:501-538.
[0091] 5. Charlesworth B, Sniegowski P (1994) The evolutionary dynamics of repetitive DNA in eukaryotes. Nature 371:215-220.
[0092] 6. Plohl M, Luchetti A, Mestrovio N, Mantovani B (2008) Satellite DNAs between selfishness and functionality: structure, genomics and evolution of tandem repeats in centromeric (hetero)chromatin. Gene 409:72-82.
[0093] 7. Quentin Y (1989) Successive Waves of Fixation of B1 Variants in Rodent Lineage History. J Mol Evol 28:299-305.
[0094] 8. Deininger P L, Batzer M A (2002) Mammalian retroelements. Genome Res 12:1455-1465.
[0095] 9. Amariglio N, Rechavi G (1993) Insertional mutagenesis by transposable elements in the mammalian genome. Environ Mol Mutagen 21:212-218.
[0096] 10. Ferrigno O et al (2001) Transposable B2 SINE elements can provide mobile RNA polymerase II promoters. Nat Gen 28:77-81
[0097] 11. Kramerov D A, Vassetzky NS (2011) Origin and evolution of SINEs in eukaryotic genomes. Nature Her 107:487-495.
[0098] 12. Carnell A N, Goodman J I (2003) The long (LINEs) and the short (SINEs) of it: altered methylation as a precursor to toxicity. Toxicol Sci 75:229-235.
[0099] 13. Rhee I et al (2002) DNMT1 and DNMT3b cooperate to silence genes in human cancer cells. Nature 416:552-556.
[0100] 14. Liu W M, Chu W M, Choudary P V, Schmid C W (1995) Cell stress and translational inhibitors transiently increase the abundance of mammalian SINE transcripts. Nucleic Acids Res 23:1758-1765.
[0101] 15. Allen T A, Kaenel S V, Goodrich J A, Kugel J F (2004) The SINE-encoded mouse B2 RNA represses mRNA transcription in response to heat shock. Nat Struct Biol 11:816-821.
[0102] 16. Jang K L, Latchman D S (1992) The herpes simplex virus immediate-early protein ICP27 stimulates the transcription of cellular Alu repeated sequences by increasing the activity of transcription factor TFIIIC. Biochem J 284:667-673.
[0103] 17. Hagan C R, Rudin C M (2007) DNA Cleavage and Trp53 Differentially Affect SINE Transcription. Genes Chromosom Cancer 46:248-260.
[0104] 18. Ting D T et al. (2011) Aberrant overexpression of satellite repeats in pancreatic and other epithelial cancers. Science 331:593-596.
[0105] 19. Nieto M, et al. (2004) The absence of p53 is critical for the induction of apoptosis by 5-aza-2′-deoxycytidine. Oncogene 23:735-743.
[0106] 20. Ossovskaya V S, et al. (1996) Use of genetic suppressor elements to dissect distinct biological effects of separate p53 domains. Proc Natl Acad Sci USA 93:10309-10314.
[0107] 21. Bunz F, et al. (1999) Disruption of p53 in human cancer cells alters the responses to therapeutic agents. J Clin Invest 104:263-269.
[0108] 22. Yoo C B, Jones P A (2006) Epigenetic therapy of cancer: past, present and future. Nature Rev Drug Discov 5:37-50.
[0109] 23. Jones P A, Baylin S B (2002) The fundamental role of epigenetic events in cancer. Nature Rev Genet 3:415-428.
[0110] 24. Borden E C, et al. (2007) Interferons at age 50: past, current and future impact on biomedicine. Nature Rev Drug Discov 6:975-990.
[0111] 25. Liu S-Y, Sanchez D J, Aliyari R, Lu S, Cheng G (2012) Systematic identification of type I and type II interferon-induced antiviral factors. Proc Natl Acad Sci USA 109:4239-4244.
[0112] 26. Müller U, et al. (1994) Functional role of type I and type II interferons in antiviral defense. Science 264:1918-1921.
[0113] 27. Fensterl V, White C L, Yamashita M and Sen G C (2008) Novel characteristics of the function and induction of murine p56 family proteins. J Virol 82:11045-11053.
[0114] 28. Wang Z, Gerstein M, Snyder M (2009) RNA-Seq: a revolutionary tool for transcriptomics. Nature Rev Genet 10:57-63.
[0115] 29. Barbot W, Dupressoir A, Lazar V, Heidmann T (2002) Epigenetic regulation of an IAP retrotransposon in the aging mouse: progressive demethylation and de-silencing of the element by its repetitive induction. Nucleic Acids Res 40:2365-2373.
[0116] 30. Probst A V, et al. (2010) A strand-specific burst in transcription of pericentric satellites is required for chromocenter formation and early mouse development. Dev Cell 19:625-638.
[0117] 31. Gaubatz J W, Cutler R G (1990) Mouse satellite DNA is transcribed in senescent cardiac muscle. J Biol Chem 265:17753-17758.
[0118] 32. Kidwell M G, Lisch D R (2001) Perspective: transposable elements, parasitic DNA, and genome evolution. Evolution 55:1-24.
[0119] 33. Ho J, Benchimol S (2003) Transcriptional repression mediated by the p53 tumour suppressor. Cell Death Differ 10:404-408.
[0120] 34. Wang B, Xiao Z, Ren E C (2009) Redefining the p53 response element. Proc Natl Acad Sci USA 106:14373-14378.
[0121] 35. Vogelstein B, Lane D, Levine A J (2000) Surfing the p53 network. Nature 408:307-310.
[0122] 36. Hauser U et al (2002) Reliable detection of p53 aberrations in squamous cell carcinomas of the head and neck requires transcript analysis of the entire coding region. Head & Neck 858-873
[0123] 37. Langlois M J et al (2010) The PTEN phosphatase controls intestinal epithelial cell polarity and barrier function: role in colorectal cancer progression. Plos One 5:1-12
[0124] 38. Burdelya L G et al (2006) Inhibition of p53 response in tumor stroma improves efficacy of anticancer treatment by increasing antiangiogenic effects of chemotherapy and radiotherapy in mice. Cancer Res 66:9356-9361.
[0125] 39. Smet C D, Loriot A (2010) Epigenetic scars of a neoplastic journey DNA hypomethylation in cancer. Epigenetics 5:206-213.
[0126] 40. Donehower L A, et al. (1992) Mice deficient for p53 are developmentally normal but susceptible to spontaneous tumours. Nature 356:215-221.
[0127] 41. Green J E, Hudson T (2005) The promise of genetically engineered mice for cancer prevention studies. Nature Rev 5:184-198.
[0128] 42. Li B, Rosen J M, McMenamin-Balano J, Muller W J, Perkins A S. (1997) neu/ERBB2 cooperates with p53-172H during mammary tumorigenesis in transgenic mice. Mol Cell Biol. 17:3155-63.
[0129] 43. Lane D P (1992) p53, guardian of the genome. Nature 358:15-16.
[0130] 44. Lerat E, Sémon M (2007) Influence of the transposable element neighborhood on human gene expression in normal and tumor tissues. Gene 396:303-311.
[0131] 45. Li T H, Kim C, Rubin C M, Schmid C W (2000) K562 cells implicate increased chromatin accessibility in Alu transcriptional activation. Nucleic Acids Res 28:3031-3039.
[0132] 46. Missiaglia E, Donadelli M, Palmieri M, Crnogorac-Jurcevic T, Scarpa A, Lemoine N R (2005) Growth delay of human pancreatic cancer cells by methylase inhibitor 5-aza-2′-deoxycytidine treatment is associated with activation of the interferon signalling pathway. Oncogene (24):199-211.
[0133] 47. Komarova E A, et al., (1997) Transgenic mice with p53-responsive lacZ: p53 activity varies dramatically during normal development and determines radiation and drug sensitivity in vivo. EMBO J 16(6):1391-400.
[0134] 48. Gottlieb E, et al., (1997) Transgenic mouse model for studying the transcriptional activity of the p53 protein: age- and tissue-dependent changes in radiation-induced activation during embryogenesis. EMBO J 16(6): 1381-1390.
[0135] 49. MacCallum D E, et al., (1996) The p53 response to ionising radiation in adult and developing murine tissues. Oncogene 13(12): 2575-87.
[0136] 50. Riley T, Sontag E, Chen P, Levine A J (2008) Transcriptional control of human p53-regulated genes. Nature Rev Mol Cell Biol 9:402-12.
[0137] 51. Esteve P O, Chin H G, Pradhan S (2005) Human maintenance DNA (cytosine-5)-methyltransferase and p53 modulate expression of p53-repressed promoters. Proc Natl Acad Sci USA 102:1000-1005.
[0138] 52. Wang Y A, et al. (2005) DNA methyltransferase-3a interacts with p53 and Represses p53-mediated gene expression. Cancer Biol Ther 4:1138-1143.
[0139] 53. Cui F, Sirotin M V, Zhurkin V B (2011) Impact of Alu repeats on the evolution of human p53 binding sites. Biol Direct 6:2.
[0140] 54. Beck C R, Garcia-Perez J L, Badge R M, Moran J V. LINE-1 elements in structural variation and disease. Annu Rev Genomics Hum Genet. 2011 Sep. 22; 12:187-215.
[0141] 55. Li B, Rosen J M, McMenamin-Balano J, Muller W J, Perkins A S. neu/ERBB2 cooperates with p53-172H during mammary tumorigenesis in transgenic mice. Mol Cell Biol. 1997 June; 17(6):3155-63.
[0142] 56. Nozawa J et al (1999) Loss of transcription factor IRF-1 affects tumor susceptibility in mice carrying the Ha-ras transgene or nullizygosity for p53. Genes Dev 13:1240-1245.
[0143] 57. Haus O. The genes of interferons and interferon-related factors: localization and relationships with chromosome aberrations in cancer. Arch Immunol Ther Exp (Warsz). 2000; 48(2):95-100.
[0144] 58. Heyman M, Grander D, Brondum-Nielsen K, Cederblad B, Liu Y, Xu B, Einhorn S. (1994) Interferon system defects in malignant T-cells. Leukemia. (8): 425-34
[0145] 59. Fountain J W, Karayiorgou M, Ernstoff M S, Kirkwood J M, Vlock D R, Titus-Ernstoff L, Bouchard B, Vijayasaradhi S, Houghton A N, Lahti J, (1992) Homozygous deletions within human chromosome band 9p21 in melanoma. Proc Natl Acad Sci USA., (89): 10557-10561.
[0146] 60. Lydiatt, W. M., Davidson, B. J., Schantz, S. P., Caruana, S. and Chaganti. (1998) R S. 9p21 deletion correlates with recurrence in head and neck cancer. Head Neck., (20):113-118.
[0147] 61. Ring C J A (2002) Cytolytic viruses as potential anti-cancer agents. J Gen Virol 83:491-502.
[0148] 62. Langmead B, Trapnell C, Pop M, Salzberg S L (2009) Ultrafast and memory-efficient alignment of short DNA sequences to the human genome. Genome Biol 10:R25.

### Example 8

[0149] This Example provides a description of the materials and methods used to obtain the results described in the previous Examples.

[0150] Analysis of Results of Total RNA Sequencing

[0151] Mapping of Illumina reads onto repetitive elements and ncRNA species was performed by the BOWTIE program (62) under default parameters. As to non-coding RNAs, the sequences from all the RNAdb (http://research.imb.uq.edu.au/madb/) sub-bases (fantom 3, RNAz, etc) were used for mapping of reads from the samples. The Repbase database (http://www.girinst.org/repbase/) was used as a set of unique repetitive elements for the mapping. The expression level of each ncRNA and repetitive element was calculated as median per-position coverage of its sequence by mapped reads. This is the per-position normalized measure of expression that does not depend on the sequence length. In order to give a biological dimension to this measure of expression for the studied ncRNA species and repetitive elements, each value was re-calculated in “β-actin units”. Namely, first, the reads of four RNA-sequence samples were mapped onto β-actin mRNA, and the median per-position counts of this mRNA across samples were calculated. Next, the per-position measure of expression for a particular ncRNA or a repetitive element in a sample was divided by the per-position value of expression for β-actin in the same sample, which gives the expression level of each studied sequence across the four RNA-seq samples in units of the β-actin expression in the corresponding sample.

[0152] Mapping of reads from the RNA samples onto B1 and B2 consensus sequences was performed by a blast-like alignment program that detects mutations more accurately than the Burrows-Wheeler indexing based programs. For each position, a significance of the mutation in three treated samples regarding the WT sample was calculated via Poisson statistics. Namely, for each position of the consensus, an expected number of counts of the consensus nucleotide at this position in a treated sample were calculated based on a frequency of this nucleotide in the WT sample. A distance in standard deviation (SD) units between the real number of counts of the consensus nucleotide in a treated sample, and expected number of nucleotide counts defines polymorphism of this particular position. The 20 SDs limit was taken as a mutation significance threshold.

[0153] Cell Lines, Chemicals and Reagents

[0154] 5-aza-2′-deoxycytidine and doxorubicin were purchased from Sigma. Unless otherwise specified, all drug treatments were carried out in Dulbecco's modified Eagle's medium (DMEM) (Invitrogen) supplemented with 10% Fetal bovine serum (FBS) and 50 ug/ml penicillin/streptomycin (Gibco). Mouse melanoma B16, squamous cell carcinoma SCC-VII, and Lewis-lung carcinoma LLC-1 cell lines were purchased from American Type Culture Collection (ATCC) and maintained in DMEM with 10% FBS. Mouse colon tumor CT26 cells were purchased from ATCC and maintained in Roswell Park Memorial Institute medium (RPMI) with 10% FBS and 50 ug/ml penicillin/streptomycin. Green fluorescent protein-tagged vesicular stomatitis virus (VSV-G/GFP) was a kind gift of Dr. Ganes Sen (Cleveland Clinic, Cleveland Ohio). Antibiotics for selection of cells transduced with retroviral/lentiviral expression vectors (see below) were puromycin (Invitrogen) and G418 (Gibco).

[0155] Mice

[0156] A colony of p53 wild-type and p53-knockout (1) mice on a C57BL/6 background was maintained by crossing p53_{+/-} females with p53_{-/-} males (purchased from Jackson Laboratories, Bar Harbor, Me.) followed by PCR based genotyping of the progeny. A colony of ifnar_{-/-} deficient (2) mice on C57BL/6 background was maintained in Cleveland Clinic (Cleveland Ohio).

[0157] Embryo Gender Determination

[0158] The gender of individual p53-null embryos was determined as described (3). Briefly, genomic DNA from each embryo was isolated using the PureLink™ Genomic DNA Kit (Invitrogen) and amplified by PCR (30 cycles) with primers for SRY (sense 5′-GATCAGCAAGCAGCTGGGATACCAGTG-3′ (SEQ ID NO:236), and antisense 5′-CTGTAGCGGTCCCGTTGCTGCGGTG-3′) (SEQ ID NO:237), and ZFY (sense: 5′-CCTATTGCATGGACTGCAGCTTATG-3′ (SEQ ID NO: 238), 5′-GACTAGACATGTCTTAACATCTGTC-3′(SEQ ID NO: 239), both located on the Y chromosome.

[0159] Primary Culture of Mouse Embryonic Fibroblasts (MEF)

[0160] MEFs were isolated from 13.5-days post-coitus embryos by breeding C57BL/6 mice p53-heterozygous (p53_{+/-}) females and males as described in the protocol (http://www.molgen.mpg.de/˜rodent/MEF_protocol.pdf). The embryos were individually plated and DNA was isolated from each embryo using the PureLink™ Genomic DNA

[0161] Kit (Invitrogen). The genotype of the embryos was determined by PCR with the following primers: 5′-ACAGCGTGGTGGTACCTTAT-3′ (SEQ ID NO: 240); 5′-TATACTCAGAGCCGGCCT-3′ (SEQ ID NO: 241); 5′-TCCTCGTGCTTTACGGTATC-3′ (SEQ ID NO: 242). MEFs were cultured in DMEM supplemented with 10% FBS and 50 ug/ml penicillin/streptomycin for no more than 8 passages.

[0162] Primary Cultures of Cells from Adult Lung and Kidney

[0163] Primary cell cultures were established with cells isolated from lung and kidney tissue of 8-week old C57BL/6 p53^{+/-} and 53^{-/-} mice. Briefly, tissues were finely minced and incubated in DMEM media containing 2 mg/ml dispase (Gibco) at 4° C. for 1 hour in a 50 ml Falcon tube. The mixture was then mechanically dissociated and placed at 37° C. for 30 min. This step was repeated twice more, each time adding 2 mg/ml of freshly prepared dispase enzyme. Up to 50 ml of DMEM was added to the tube before centrifugation at 10,000×rpm for 5 minutes. The supernatant was removed and cells were plated in DMEM supplemented with 10% FBS and 50 ug/ml penicillin/streptomycin.

[0164] Primary Culture of Adult Mouse Hepatocytes

[0165] Hepatocytes were isolated from adult male C57BL/6 p53-wt and p53-null mice after two-step perfusion (performed essentially as described (4) with some modifications). Briefly, liver perfusion was performed on mice deeply anesthetized with Isoflurane through the inferior vena cava using a peristaltic pump at a speed of 3-4 ml per minute. The liver was perfused with EGTA (0.5 mM EGTA (Sigma) in PBS without calcium and magnesium, 30 ml) following collagenase (0.02% collagenase (Sigma) in DMEM medium containing penicillin/streptomycin, 50 ml). After perfusion, the gall bladder was removed; the liver was dissected from the animal and gently disrupted in 50 ml DMEM. Cells were filtered through a cell strainer and left to sediment for 20 min at +4° C. The cell pellet was dissolved in 20 ml DMEM. 10 ml of cell suspension was overlaid on the top of a two-step Percoll (Fisher Scientific) gradient (50% and 25% Percoll in PBS, 20 ml each) in a 50 ml conical tube (two tubes per liver). Purified hepatocytes were collected from the bottom of the tube after centrifugation (20 min, 1750×g) and resuspended in 50 ml DMEM plus 10% FCS. The typical yield was 40-50×10⁶ nuclei per liver (note that the majority of adult mouse hepatocytes are bi-nuclear) with 93-95% viability. After attachment (usually 1-1.5 hours) plates were washed, medium was replaced with William's E medium (WEM) (Invitrogen) containing 10% FCS and supplements (penicillin/streptomycin, 2 mM glutamine (Invitrogen), 10 mM nicotinamide (Sigma), ITS (Sigma), 50 ng/ml EGF (Peprotech) and 10-7M dexamethasone (Sigma)) (5). Quiescent hepatocytes were kept in DMEM medium supplemented with 10% FBS.

[0166] Cell Viability Assay

[0167] To determine cell viability, cells were plated in triplicate in 96-well plates at a density of 3,000 cells per well and treated with increasing concentrations of 5-aza-dC as specified in the text. At the indicated time, cells were stained using 0.4% methylene blue (USB) in 50% methanol (BDH). Plates were photographed or the dye was extracted from stained cells using 3% HCl solution for spectrophotometric quantitation.

[0168] Estimation of 5-Methylcytosine Content in Genomic DNA

[0169] Genomic DNA was extracted from p53-WT and p53-null MEFs left untreated or treated with 10 μM 5-aza-dC for 48 hours using the PureLink™ Genomic DNA Kit (Invitrogen) according to the manufacturer's instructions. DNA samples (1 μg) were digested with the methylation-sensitive McrBC restriction enzyme (New England Biolabs) and resolved on a 1.5% agarose gel.

[0170] Western Immunoblotting

[0171] Protein extracts were prepared by lysing cells in RIPA buffer (Sigma) with protease inhibitor cocktail (Sigma). Extracts were spun down at 10,000 rpm for 10 minutes at 4° C. to obtain the soluble fraction. Protein concentrations were determined by BioRad Protein Assay (Bio-Rad). Equal amounts of protein were run on gradient 4-20% precast gels (Invitrogen) and blotted/transferred to Immobilon-P membrane (Millipore). Membranes were blocked with 5% non-fat milk-TBS-T buffer for 1 hour and incubated overnight with primary antibodies. The following primary antibodies were used: Anti-p53 (Ab-1) (Pantropic) Mouse mAb (PAb421) (Calbiochem); anti-p-VSV (a kind gift of Dr. Amiya Banerji, Cleveland Clinic); and anti-dnmt-1 mouse mAb (Calbiochem). To verify equal protein loading and transfer, β-actin (Santa Cruz) or α-tubulin (Santa Cruz) antibodies were used. Anti-mouse and anti-rabbit secondary horseradish peroxidase-conjugated antibodies were purchased from Santa Cruz. ECL detection reagent (GE Healthcare) was used for protein visualization on autoradiography film (Denville Scientific).

[0172] Detection of Interferon Induction by Western Immunoblotting

[0173] Total RNA was depleted of its ribosomal fraction by using Ribo-Zero Ribosomal RNA removal kit (Epicentre) following manufacturer's instructions. SCC-VII cells were transfected by calcium phosphate method with 500 ng of total RNA, 500 ng of ribosomal depleted RNA or 1 μg/ml of poly I:C (Sigma) along with 250 ng of plv-CMV-GFP plasmid as control. Protein extracts were prepared 29 hours later by lysing cells in RIPA buffer (Sigma) with protease inhibitor cocktail (Sigma). Extracts were spun down at 10,000×rpm for 10 minutes at 4° C. to obtain the soluble fraction. Protein concentrations were determined by BioRad Protein Assay (Bio-Rad). Equal amounts of protein were run on gradient 4-20% precast gels (Invitrogen) and blotted/transferred to Immobilon-P membrane (Millipore). Membranes were blocked with 5% non-fat milk-TBS-T buffer for 1 hour and incubated overnight with primary antibodies. The following antibodies were used: mouse p49 (a kind gift of Dr. Ganes C. Sen, Cleveland Clinic). To verify equal protein loading and transfer β-actin (Santa Cruz) antibody was used. Anti-rabbit secondary horseradish peroxidase-conjugated antibody was purchased from Santa Cruz. ECL detection reagent (GE Healthcare) was used from protein visualization onto Autoradiography film (Denville Scientific).

[0174] High Throughput Sequencing of Total Poly(A)+ RNA

[0175] Total RNA was isolated from p53-WT and p53-null MEFs left untreated or treated with 5-aza-dC (10 μM for 48 hours) using Trizol (Life Technologies) according to the manufacturer's protocol. Total RNA samples (5 μg) were depleted of 28S, 18S and 5S rRNA using the Ribo-Zero rRNA removal kit (Agilent) according to the manufacturer's protocol. rRNA-depleted total RNAs were converted to adaptor-ligated cDNA using the reagents and protocol of the TruSeq RNA Sample Preparation kit (Illumina) with minor modifications. Briefly, rRNA-depleted total RNAs were fragmented to 200-300 nt fragments by incubation in Elute/Prime/Fragment solution (Illumina) at 98° C. for 8 min, reverse transcribed with HP MMLV-RT (Agilent) in 50-p1 reaction mix at 25° C. for 10 min and 42° C. for 1 hr, followed by second-strand cDNA synthesis in 100-ul reaction mix using second-strand master mix (Illumina, mixture of DNA polymerase I and RNAse H) at 16° C. for 1 hr and double-stranded cDNAs were purified by Qiaquick PCR purification kit (Qiagen). Double-stranded cDNAs were treated with end repair mix (Illumina, mix of Klenov enzyme and T4 DNA polymerases) at 30° C. for 30 min, purified using Qiaquick purification kit (Qiagen), tailed with 3′-A-overhangs using A-tailing mix (Illumina, mix of Klenow exo-DNA polymerase and rATP) at 37° C. for 30 min, ligated with RNA adapter 5 (Illumina) using ligation mix (Illumina, T4 DNA ligase) at 30° C. for 30 min and purified by Qiaquick PCR purification kit (Qiagen). Adapter ligated cDNAs were amplified by Titanium DNA polymerase (Clontech) in 100 μl of PCR reaction buffer using PCR primer mix (Illumina) and the following PCR cycling conditions: 10 cycles of (94° C. for 30 sec, 60° C. for 10 sec and 72° C. for 30 sec). Amplified cDNA products were purified by Qiaquick PCR purification kit (Qiagen) and separated in preparative 3.5% agarose/1×TAE gel. PCR products with sizes 180-300 bp (cover appr. 90% of amplified size distribution) were excised from agarose gel, purified by Qiaquick Gel Extraction Kit (Qiagen), quantitated by OD at 260 nm, adjusted to 10 nM concentrations. The final adaptor-ligated cDNA samples were sequenced in HiSeq2000 (Illumina) single read flow cells using the HP6 sequencing primer (50 nt reads and approximately 80×10₆ reads per sample).

[0176] Vesicular Stomatitis Virus (VSV) Infection

[0177] p53-WT and p53-null MEFs were plated at equal densities and either left untreated or treated with 10 μM 5-aza-dC for 36 hours in DMEM supplemented with 10% FBS. Equal titers of VSV-G/GFP virus was added for 6 hours, after which the presence of the virus was assayed by Western blotting with antibodies specific to the P-protein of the virus.

[0178] Electrophoretic Mobility Shift Assay (EMSA)

[0179] Nuclear extracts were isolated from doxorubicin-treated B16 cells as described (6, 7). Each binding reaction contained 10 mM HEPES (pH 7.5), 80 mM KCl, 1 mM EDTA, 1 mM EGTA. 6% glycerol, 0.5 μg of sonicated salmon sperm DNA, 5 μg of nuclear protein extract and a 5′-end′-[³²P]-labeled double stranded oligonucleotide probe containing the p53 binding sequence from the p21 (WAF1) promoter (5′-AGCTTAGGCATGTCTAGGCATGTATA-3′ (SEQ ID NO:275); putative p53 binding sites located within the mouse SINE B1 sequence: (5′-GCCGGGCATGGTGGCGCACGCCTTTAATCCCAGCACTTGGGAAGAGGCAGGCGG ATTTCTGAGTTCGAGGCCAGCCTGGTCTAC-3′ (SEQ ID NO:243); point mutations introduced into the putative p53-binding sites located within SINE B1 sequence: 5′-GCCGGGAATTGTGGCGAACTCCTTTAATCCCAGCACTTGGGAGGCAGAGGCAGG CGGATTTCTGAGTTAGATGCCAGCATGTTCTAC-3′ (SEQ ID NO: 244). DNA-binding reactions were carried out at room temperature for 30 minutes. To determine sequence specificity anti-p53 (pab421) (Calbiochem) antibodies were added to the reaction. The cold oligonucleotide competitor challenge was carried out by incubating DNA-binding reactions with increasing excesses of unlabeled oligonucleotide containing the SINE B1 ‘p53-binding’ site sequence (400 nM (1:10), 800 nM (1:20), and 1600 nM (1:40)). DNA-protein complexes were separated on a 6% acrylamide gel and visualized by Typhoon Phospho-Imager.

[0180] Polymerase Chain Reaction

[0181] cDNA was synthesized from 1 μg of total RNA isolated by TRIzol (Invitrogen) using the iScript cDNA Synthesis Kit (BioRad). PCR was carried according to the manufacturer's protocol with Taq PCR Master Mix (USB) in a reaction volume of 25 μl with 100 ng of the following primers: mouse-IFNβ1 (sense: 5′-CTCCACGCTGCGTTCCTGCT-3 (SEQ ID NO: 245); antisense: 5′-TCGGACCACCATCCAGGCGT-3′ (SEQ ID NO: 246), mouse-IRF7 (sense: 5′-CAGCCAGCTCTCACCGAGCG-3′ (SEQ ID NO: 247); antisense: 5′-GCCGAGACTGCTGCTGTCCA-3′ (SEQ ID NO: 248) mouse-H2-Q6 (sense: 5′-TGTGACGTGGGGTCCGACGA-3′ (SEQ ID NO: 249); antisense: 5′-AGGGTAGAAGCCCAGGGCCC-3′(SEQ ID NO: 250) mouse CXCL10 (sense: 5′-TGGCTAGTCCTAATTGCCCTTGGT-3′(SEQ ID NO: 251), antisense: 5′-TCAGGACCATGGCTTGACCATCAT-3′(SEQ ID NO: 252), mouse-β-actin (sense: 5′-GCTCCGGCATGTGCAA-3′ (SEQ ID NO: 253). antisense: 5′-AGGATCTTCATGAGGTAGT-3′(SEQ ID NO: 254).

[0182] Retroviral/Lentiviral Vectors and Transduction

[0183] We used retroviral plasmid encoding dominant-negative inhibitor of p53, GSE56 (8) and lentiviral plasmid encoding shRNA against p53 (9) as previously described. For preparation of retroviral stocks, Phoenix-ampho packaging cells were used, while 293T cells were used for preparation of lentiviral stocks. Cells were transfected with the vectors, using Lipofectamine-2000 reagent (Invitrogen); in the case of lentivirus, two helper plasmids, pCMVΔR8.2 and pVSV-G, were cotransfected along with experimental vector. Supernatants containing infectious viral particles were harvested 24, 36, and 48 hours post-transfection, pooled, and filtered. Infections of exponentially growing cells were performed with virus-containing supernatant supplemented with 4 μg/mL polybrene (Sigma).

[0184] Microarray Analysis

[0185] Total RNA was extracted using Trizol (Invitrogen) from p53-WT and p53-null MEFs that were either untreated or treated with 10 μM 5-aza-dC for 48 hours. The resulting four RNA samples were analyzed on Illumina Mouse WG-6 v2.0 Expression BeadChips containing probes for more than 45,200 transcripts by the Gene Expression Facility at Roswell Park Cancer Institute (Buffalo, N.Y.).

[0186] Northern Hybridization

[0187] Mouse cDNA probes for SINE B1 (sense: 5′-GCCTTTAATCCCAGCACTTG-3′ (SEQ ID NO: 255), antisense: 5′-

[0188] CTCTGTGTAGCCCTGGTCGT-3′ (SEQ ID NO: 256), SINE B2 (sense: 5′-GCACCTGACTGCTCTTCCAGAGGT-3′(SEQ ID NO: 257), antisense: 5′-TCTTCAGACACACCAGAAGAGGGCA-3′(SEQ ID NO: 258), IAPEZI (sense: 5′-TGGATGGGCTCGGGAAGCCA-3′(SEQ ID NO: 259), antisense: 5′-TCTCTGCGCACTGCTGACGC-3′(SEQ ID NO: 260), FR0149069 (sense: 5′-GCCGCTCGGCACTCCTTTGT-3′(SEQ ID NO: 261), antisense 5′-CCTGCCGACTGGCAAACGGT-3′(SEQ ID NO: 262), FR0228915 (sense: 5′-GGTCGCTGGCCACTCAGCTC-3′ (SEQ ID NO: 263) antisense: 5′-TAACGGCGAATGTGGGGGCG-3′(SEQ ID NO: 264), and gamma-satellite (sense: 5′-TGGCGAGGAAAACTGAAAAAGGTGG-3′(SEQ ID NO: 265), antisense: 5′-GCCATATTCCACGTCCTACAGTGGA-3′(SEQ ID NO:266), were generated by RT-PCR from total RNA of MEF cells. The cDNAs were labeled with [α³²P]-dCTP using the Random Primed DNA Labeling Kit following the protocol provided by Roche (Mannheim, Germany). Total RNA was extracted from p53-WT and p53-null MEFs that were either untreated or treated with 10 μM 5-aza-dC for 48 hours using Trizol (Invitrogen). Total RNA (5 μg per lane) was electrophoresed in an agarose-formaldehyde gel and transferred to Hybond-N membrane (Amersham Pharmacia Biotech). After UV crosslinking, membranes were hybridized with [032P]-dCTP-labeled probes and analyzed by autoradiography at −80° C. To determine SINE B1 expression in mouse spontaneous tumors, MMTV/her2neu tumor-bearing mice were sacrificed to excise tumors. Total RNA was extracted using Trizol (Invitrogen) and Northern blotting was performed as described above.

[0189] Dot-Blot Hybridization

[0190] Single stranded oligonucleotide probes for gamma-satellite forward [(F): 5′-

[0191] CTGTAGGACGTGGAATATGGCAAGAA-3′(SEQ ID NO:267)] and reverse [(R): 5′-TTTCTCATTTTTGACGTCTTTTAGTGA-3′(SEQ ID NO:268)] strands were 5′-end′-[α³²P]-labeled using T4 polynucleotide kinase (Promega). Unincorporated radioactivity was removed using Illustra MicroSpin-G-25 Columns (GE Life Sciences). Total RNA was isolated using Trizol (Invitrogen) from cells (CT26, LLC-1, SCC-VII) left untreated or treated with 10 μM 5-aza-dC for 48 hours. Total RNA was also isolated from tumor-free thymuses or tumor-bearing thymuses of p53-null C57BL/6 mice using Trizol. Total RNA was denatured by boiling for 5 min and blotted (500 ng per dot) onto a positively charged nylon membrane (GE Life Sciences). After UV crosslinking, membranes were prehybridized at 58° C. for 1 hour and then hybridized at 58° C. overnight with [³²P]-labeled probe. The membranes were analyzed by autoradiography at −80° C.

[0192] Caspase Activity Assay

[0193] The caspase 3,7 activation assay was performed using 30 mM of fluorigenic Ac-DEVD-AMC substrate (ENZO). Cells were incubated in buffer [50 mM HEPES (pH 7.5), 100 mM NaCl, 2 mM EDTA, 0.1% CHAPS, 10% sucrose and 5 mM DTT] with 30 nM Ac-DEVD-AMC at 37° C. for 1 hour. Caspase activity was quantified by spectrophotometer (excitation at 380 nm and emission at 440 nm).

### REFERENCES FOR MATERIALS AND METHODS

[0194] 1. Donehower L A et al (1992) Mice deficient for p53 are developmentally normal but susceptible to spontaneous tumours. Nature 356:215-221.
[0195] 2. Müller U. et al. (1994) Functional role of type I and type II interferons in antiviral defense. Science 264:1918-1921.
[0196] 3. Koopman P, Gubbay J, Vivian N, Goodfellow P, Lovell-Badge R (1991) Male development of chromosomally female mice transgenic for Sry. Nature 351:117-121.
[0197] 4. Gleiberman A S, Sharovskaya YuYu, Chailakhjan L M (1989) “Contact inhibition” of alpha-fetoprotein synthesis and junctional communication in adult mouse hepatocyte culture. Exp Cell Res 184:228-234.
[0198] 5. Fougère-Deschatrette C., et al. (2006) Plasticity of hepatic cell differentiation: bipotential adult mouse liver clonal cell lines competent to differentiate in vitro and in vivo. Stem Cells 24: 2098-2109.
[0199] 6. Lyakh L A, et al. (2000) Bacterial lipopolysaccharide, TNF-alpha, and calcium ionophore under serum-free conditions promote rapid dendritic cell-like differentiation in CD14+ monocytes through distinct pathways that activate NK-kappa B. J Immunol 165:3647-3655.
[0200] 7. Gasparian A V, et al. (2011) Curaxins: anticancer compounds that simultaneously suppress NF-κB and activate p53 by targeting FACT. Sci Transl Med 3:95-74.
[0201] 8. Ossovskaya V S, et al. (1996) Use of genetic suppressor elements to dissect distinct biological effects of separate p53 domains. Proc Natl Acad Sci USA 93:10309-10314.
[0202] 9. Boiko A D, et al. (2006) A systematic search for downstream mediators of tumor suppressor function of p53 reveals a major role of BTG2 in suppression of Ras-induced transformation. Genes Dev 20:236-252.

[0203] While the invention has been described through specific embodiments, routine modifications will be apparent to those skilled in the art and such modifications are intended to be within the scope of the present invention.

We claim:

1. A method for detection of cancer or a pre-cancerous condition in an individual comprising: detecting in a sample obtained or derived from the individual at least one RNA transcript, the transcription of which is repressed by a combination of functional p53 and DNA methylation in a cell that is not a cancer or a pre-cancerous cell.

2. The method of claim 1, wherein the at least one RNA transcript is transcribed from a repeat of a genomic DNA polynucleotide sequence.

3. The method of claim 1, wherein a plurality of RNA transcripts is detected, and wherein the plurality of transcripts is a combination of at least two of the transcripts selected from the group of transcripts defined in Table 1, Table 2, Table 3, SEQ ID NO:276 through SEQ ID NO:351, and combinations thereof.

4. The method of claim 4, wherein the plurality of RNA transcripts is a combination of the RNA transcripts defined in Table 2.

5. The method of claim 1, wherein the biological sample is a sample comprising blood.

6. A method for predicting sensitivity of a tumor in an individual to treatment with a DNA demethylating agent comprising determining from a biological sample from the individual the presence or absence of:
i) ncRNA and/or RNA transcripts transcribed from a repeat of genomic polynucleotide sequence repeat, the transcription of which is normally suppressed by functional p53, or
ii) constitutive activation of an interferon type I response; or
iii) a combination of i) and ii).

7. The method of claim 6, comprising determining the absence of i), or ii) or iii) and identifying the tumor in the individual as likely to be sensitive to the treatment with the DNA demethylating agent.

8. The method of claim 7, further comprising treating the individual with the DNA demethylating agent.

9. The method of claim 7, wherein the DNA demethylating agent is 5-aza-dC.

10. A method of classification of a tumor, the method comprising determining whether or not the tumor exhibits indicia of TRAIN, wherein the indicia of TRAIN comprise:
i) ncRNA species and/or RNA transcripts transcribed from polynucleotide sequence repeats, the transcription of which is normally suppressed by functional p53, or
ii) constitutive activation of an interferon type I response; or
iii) a combination of i) and ii).

11. The method of claim 10, wherein the plurality of the ncRNA species and the RNA transcripts is a combination of at least two RNA polynucleotides defined in Table 1, Table 2, Table 3, SEQ ID NO:276 through SEQ ID NO:351, and combinations thereof.

12. The method of claim 11, wherein the plurality of ncRNA species and/or the RNA transcripts is a combination of at least two RNA polynucleotides defined in Table 2.

13. A method of determination of functional status of p53 in a cell or tumor, the method comprising determining whether or not the cell or the tumor exhibits indicia of TRAIN, wherein the indicia of TRAIN comprise:
i) ncRNA species and/or RNA transcripts transcribed from polynucleotide sequence repeats, the transcription of which is normally suppressed by functional p53, or
ii) constitutive activation of an interferon type I response; or
iii) a combination of i) and ii), wherein the presence of indicia of TRAIN is indicative that the p53 is not functional.

14. The method of claim 13, wherein the plurality of the ncRNA species and the RNA transcripts is a combination of at least two RNA polynucleotides defined in Table 1 and/or Table 2 and/or Table 3 and/or by SEQ ID NO:276 through SEQ ID NO:351, and combinations thereof.

15. The method of claim 14, wherein the plurality of ncRNA species and/or the RNA transcripts is a combination of at least two RNA polynucleotides defined in Table 2.

The application's sequence listing, which the Patent Office published only in electronic form, follows.

SEQUENCE LISTING (351 sequences)

SEQ ID NO: 1 - DNA, 3305 bp, Mus. musculus
gctagagtaccagtgagtacagctttacgaggtaagtctgatcttgaactttctaaggaaattcaagacagtctatcagaagtaaagtggaaaatggctttacaagttatgtttggccttgaattttttctagtgttagaagcccttttgttccttttcacatgttatcaagtggttaaggcagggcggattctagatgaaattcaggacaagctatcagaagtaaagcggggagagagagtaggaacaaagaggaaatatggtacacaaaataagtatacaggcctttccaagggtcttgaacccgaggaaaagttaaggttaggtaggaatacctggagagagattagaagaaaaagaggaaaaagggaaaagaagaaagatcaattagcggaggtctctaggaaaaggagcctgtgctcatcgctggatgggctcgggaagccagctcttagtagctctgaagcaggtgaagaatcctcctctgaggaaacagactgggaggaagaagcagcccattaccagccagctaattggtcaagaaaaaagccaaaagcggctggcgaaggccagtttgctgattggcctcagggcagtcggcttcaaggtccgccctatgcggagtccccgccctgcgtagtgcgtcagcaatgcgcagagagatgcgcagagaggcagtgcgcagagaggcagtgcgcagactcattcattcccagagaggaacaaaggaaaatacaacaggcatttccggtctttgaaggagccgagggtgggcgtgtccacgctccggtagaatacttacaaattaaagaaattgccgagtcggttcgtaaatatggaaccaatgctaattttaccttggtgcagttagacaggctcgccggcatggcactaactcctgctgactggcaaacggttgtaaaagccgctctccctagtatgggcaaatatatggaatggagagcgctttggcacgaagctgcacaagcgcaggcccgagcaaacgcagctgctttgactccagagcagagagattggacttttgacttgttaacgggtcagggagcttattctgctgatcagacaaactaccattggggagcttatgcccagatttcttccacggctattaggcctggaaggcgctctcgagcaggtgaaaccactggtcagttaacaaagataatccagggacctcaggaatccttctcagattttgtggccagaatgacagaggcagcagagcgtatttttggagagtcagagcaagctgcgcctctgatagaacagctaatctatgagcaagccacaaaggagtgccgagcggtccatagccccaagaaagaacaaaggcttacaagactggctcagggtctgtcgagagcttgggggaaacccagactccttaagactgataatggaccagcttatacgtctcaaaaattccaacagttctgccgtcagatggacgtgacccacctgactggacttccatacaaccctcaaggacagggtattgttgagcgtgcgcatcgcaccctcaaagcctatcttataaaacagaagaggggaacttttgaggagactgtaccccgagcaccaagagtgtcggtgtctttggcactctttacactcaattttttaaatattgatgctcatggccatactgcggctgaacgtcatgttcagagccagataggcccaatgagatggttaaatggaaaaatgtccttgataataaatggtatggcccggatcctatcttgataagatccaggggagctatctgtgtttccccacagaatgaagacaacccattttgggtaccagaaagactcacccgaaaaatccagactgaccaagggaatactaatgtccctcgtcttggtgatgtccagggcgtcaataataaagagagagcagcgttgggggataatgtcgacatttccactcccaatgacggtgatgtataatgctcaagtattctcctgcttttttaccactaactaggaactgggtttagccttgattcagacagccttggctctgtctggacaggtccagatgactgacaccattaacactttgtcagcctcagtgactacagtcatagatgaacaggcctcagctaatgtcaagatacagagaggtctcatgctggttaatcaactcatagatcttgtccagatacaactagatgtattatgacaaataactcagcagggatgtgaacaaaagtttccgggattgtgtgttatttccattcagtatgttaaatttactagggcagctaatttgtcaaaaagtctttttcagtatatgttacagaattggatggctgaatttgaacagacccttcgaggcttgccatcattcaggtcaactccacgcgcttggacctgtccctgaccaaaggattacccaattggatctcctcagcattttctttctttaaaaaatgggtgggattaatattatttggagatacactttgctgtggattagtgttgcttctttgattggtctgtaagcttaaggcctaaactaggagagacaaggtggttattgcccaggcgcttgcaggactagaacatggagcttcccctgatatatctatgcttaggcaataggtcgctggccactcagctcttatatctcacgaggctagtctcattgcacgggatagagtgagtgtgcttcagcagcccgagagagttgcaaggctaagcactgcaatggaaaggctctgcggcatatatgagcctattctagggaaacatgtcatctttcatgaaggttcagtgtcctagttcccttcccccaggcaaaacgacacgggagcaggtcagggttgctctgggtaaaagcctgtaagcctaagagctaatcctgtacatggctcctttacctacacactggggatttgacctctatctccactctcattaatatgggtggcctatttgctcttattaaaagaaaaagggggagatgttgggagccgcccccacattcgccgttacaagatggcgctgacatcctgtgttctaagtggtaaacaaataatctgcgcatgtgccaagggtatcttatgactacttgtgctctgccttccccgtgacgtcaactcggccgatgggctgcagccaatcaaggagtgatacgtccgaggcgaaggagaatgctccttaagagggacggggttttcgttttctctctctcttgcttcttgctctcttgcttcttgctctcttgcttcctgcaccctggctcctgaagatgtaagaaataaagctttgccgcag

SEQ ID NO: 2 - DNA, 3827 bp, Mus. Muscl.
ctcttgcttcttgcactctggctcctgaagatgtaagcaataaagctttgccgcagaagattctggtttgttgcgtctttcctggccgggcgtgagaacgcgattaagaattggtgctgaaatccgggacgagaaattccgggacgagaaaaaatccgggaagaaaaaacccgggaggaaactcgggacgggagtttcaccggcacaaggaagatccctcattccagaaccagaactgcgggtcgcggtaataaaggttcccgtaaagcagactgttaagaaggattcaactgcatgaattcagaacttttcagctggggaacggcggtaaccgtaaagtatagctttacgaggtacgcctggccttgaactttctaaggaaattcaagacagtctatcagaagtaaagtggaaaatagctttataaggtatgtttggccttgaactttctctagtgttagaagcccttttgttccttttcacatgttatcaagtggttaaggcagggcggattctggatgaagttcaggacaatctatcagaagtaaagcggggagagagaataggagcaaagagaaaatatggtacacaaaataagtatacaggcctttccaagggtcttgaacctgaggaaaagtttaggtcaggtaagaatacctggggagagattagaaggaaggagaaggaaaaagaaaagaaaaaagatcaattagagaagccagttcttagtagttctgaatcagatgaaaaggctattagggcctggaaggcgctctcccgagcaggtgaagccactggacaataatgacagaggcaggctcttgcagcctacaaggtcttattgtccaccctagagttgtagatcaagattataaaggggaacttcaggttctctgttcttgtcctcaagttgtcttttctatatcacaaggggacagaatagctcaactaataattttgccaagcctacatggctgttttttcttcctctggtattcctagagctgcaagagggattggttctactgaaaatgattctgattacttaataatgcctttagattgttgtcaaattttgtctactcacgtaggggtaaaccctcgtggcgtcaggccattacaggtctgacaaatggatgtcacgcatatttcctcctttgagagaaatcaatatttacatgtttagaagaaacccacttaaaaatgggattgtggtatatactgatggatcaaaaactggcataggtgcctatgtggctaatggtaaagtggtatccaaacaatataatgaaaattcacctcaagtggtagaatgtttagtggttttagaagttttaaaaacctttttagaaccccttaatattgtgtcagattcctgttatgtggttaatgcagtaaatcttttagaagtggctggagtgattaagccttccagtagagttgccaatatttttcagcagatacaattagttttgttatctagaagatttcctgtttatattactcatgttagagcccattcaggcctacctggccccatggctctgggaaatgatttggcagataaggccactaaagtggtggctgctgccctatcatccccggtagaggctgcaagaaattttcataacaattttcatgtgacggctgaaacattacgcagtcgtttctccctgacaagaaaagaagcccgtgacattgttactcaatgtcaaagctgctgtgagttcttgccagttcctcatgtgggaattaacccacgcggtattcgacctctacaggtctggcaaatggatgttacacatgtttcttcctttggaaaacttcaatatctccatgtgtccattgacacatgttctggcatcatgtttgcctctccgttaaccggagaaaaagcctcacatgtgattcaacattgtcttgaggcatggagtgcttgggggaaacccagactccttaagactgataatggaccagcttatacgtctcaaaaattccaacagttctgccgtcagatggacgtgacccacctgactggacttccatacaaccctcaaggacagggtattgttgagcgtgcgcatcgcaccctcaaaacctatcttataaaacagaagaggggaacttttgaggagactgtaccccgagcaccaagagtgtcggtgtctatggcactctttacactcaattttttaaatattgatgttcatggccatactgcggctgaacgtcattgttcagagccagataggcccaatgagatggttaaatggaaaaatgtccttgataataaatggtatggcccggatcctattttgataagatccaggggagctatctgtgttttcccacagaatgaagacaacccattttggataccagaaagactcacccgaaaaatccagactgaccaagggaatactaatgtccctcgtcttggtgatgtccagggcgtcaataataaagagagagcagcgttgggggataatgtcgacatttccactcccaatgacggtgatgtataatgctcaagtattctcctgcttttttaccactaactaggaactgggtttagccttaattcagacagccttggctctgtctggacaggtccagacgactgacaccattaacactttgtcagcctcagtgactacagtcatagataaacaggcctcagctaatgtcaagatacagagaggtctcatgctggttaatcaactcatagatcttgtccagatacaactagatgtattatgacaaataactcagcagggatgtgaacaaaagtttccgggattgtgtgttatttccattcagtatgttaaatttactagggcagctaatttgtcaaaaagtctttttcagtatatgttacagaattggacggctgaatttgaacagatccttcgggaattgagacttcaggtcaactccacgcgcttggacctgtccctgaccaaaggattacccaattggatctcctcagcattttctttctttaaaaaatgggtgggattaatattatttggagatacactttgctgtggattagtgttgcttctttgattggtctgtaagcttaaggcccaaactaggagagacaaggtggttattgcccaggcgcttgcaggactagaacatggagctccccctgatatatggttatctatgcttaggcaataggtcgctggccactcagctcttacatctcacgaggctagactcattgcacgggatagagtgagtgtgcttcagcagcccgagagagttgcacggctaagcactgcaatggaaaggctctgcggcatatatgagcctattctagggagacatgtcatctttcatgaaggttcagtgtcctagttcccttcccccaggcaaaacgacacgggagcaggtcagggttgctctgggtaaaagcctgtgagcctaagagctaatcctgtacatggctcctttacctacacactggggatttgacctctatctccactctcattaatatgggtggcctatttgctcttattaaaaggaaagggggagatgttgggagccgcgcccacattcgccgttacaagatggcgctgacagctgtgttctaagtggtaaacaaataatctgcgcatatgccgagggtggttctctactccatgtgctctgccttccccgtgacgtcaactcggccgatgggctgcagccaatcagggagtgacacgtcctaggcgaaatataactctcctaaaaaagggacggggtttcgttttctctctctcttgcttcttgcactctggctcctgaagatgtaagcaataaagctttgccgc

SEQ ID NO: 3 - DNA, 2006 bp, mus muscl
agcctgctgcccgtgggtcagcaaactcggagtcccaggagaagatctctacgaagggaactcggaggatcaggacagccacaggcttttgctaggcaggaacacatactgctgagctcccaacaggagcctggactcctcactcctggagatggccggaaactgttcatgggaagctcactccaccaaccagaacaagatgtgtcctggtatgagcgaggctcgggagctctacagcagaggatttctgaccattgagcagattgctacgctccctccgccagctgtcacaaactatatcttcctgctgctttgcctgtgtggcctggtgggaaacgggctggtcctctggtttttcggcttctccatcaagaggacccctttctccatctacttcctgcacctggccagcgccgatgggatgtacctcttcagcaaggccgtgattgctctcctgaacatggggaccttcctgggctccttccccgactacattcgaagagtgtcccggatcgtggggctctgcacattcttcacaggtgtgagcctcctgccagccattagcatcgaacgctgtgtgtctgtcatcttccccacctggtactggcgtcggaggcccaagcgcctgtcagctggggtctgtgccctgctctggatgctatcattcctggttaccagtatccacaattacttctgtatgttcctgggccacgaggcccctggtacagtctgccgcaacatggacatcgccctgggcatcttgctgttctttctcttctgcccactcatggtacttccctgcctggcgctcatcctgcacgtagagtgccgagcacggcgccgccaacgctctgccaagctcaatcacgtggtcctggcgatcgtctctgtcttcctcgtatcatccatctacttggggatcgactggttcctcttctgggtcttccagatcccagcccccttccccgagtacgtcactgacttgtgtatctgcatcaacagcagtgccaaacccatcgtctacttcctggctgggagagacaagtcacagcgcctgtgggaacctctcagggtggtcttccagcgggctctccgggatggtgcggagccgggggacgctgctagcagcacacccaacacggtcaccatggaaatgcagtgcccctctgggaacgcatcctgagaggccaacttctggggcaaggctgcagcagagagcggccagtagcttccagagacactctgcccgagggcaggagtagggcagctgcccctgtgctgccagggagaagacctgccttaacactcttgtcaggggtggccaggaggctgagcagccacctctggacagaccctgtggcctctgctccccaaccattctgcttctgtgactcagtgtaccaaagttgccctcaccagcatggtagggtcccttcttaacagaagctcaagagcgaaggcaagaaggaggtcacctcctcaaacgtgactcatcgagcatcaccctccctgggccagcagcctcagccccacccccagggagttgttcagcctcccaaggctgcatcagaacaaaccctagagaacggtgctatctggaactgggtcctgtccactggcattgcactctgcaaacaagcccctgcccctttgatgagtcacctagtgactttaatgggatgggatctggccttggcaagccatgtgagacagaaaggaccttctgtcaccatgggtagctgactgcttttctgaccccacccacccaccccaaccagccagctctgggtagctgactgcactcagcatcttccaggccactgtagtccactgctaagtcctcaatctcctgtacccatttcaaagtggactctggccccctggaggctgccaccacgatgtcactcatcatccagcacagtggcctgtgtagccaaaggaagttttataaaagataataaagtatatatcaatacacatttttttaaactttgcagtgaagcagg

SEQ ID NO: 4 - DNA, 2179 bp, mus muscl
gcagtactgagagtggaagtgactgagcagtgctgtggtcacagaccacaccacccacagctcataggattctgtgaagttctcctgcctgagagaaaactcagttcagaaggagaaaggacagcagaggccaggtgccttgctggagctgaagggttttttcctcagagaaaggccagtacagttgaagagatatgggagtgacctctgaacttttcaccaatgtccttatcccttggcagagggtcctgttcacagcctccctcttgacctgctggcttctgtccaccactgctagtgtcaccatccagtcaccacaacacgtagttgaaggagagaatattcttctacaagttgacaatctgccagagaatcttctagcttttgcctggtacagaggactgacaaattggaggctcacaattgctgtgtatttactggactatagcacaagtatgacagggcctgagcacagtgatagagagatattgtacagcaacgggtccctatggatccaaaatgtcacacaggaggacacaggatattacactcttcaaaccataagtaaccatggagaactggaatcaaatacatccacatttcttcaggtctactcgtctcatttcacctgtgggcgtccttccttccctgccaagctcactattgaatcagtgccgcccagcgttgctgaaggaggaagcgttcttctccgtgttcacaatcttccagagtatcttcaattatttttttggtacaaaggggtgattatgattcacaaggttgagattgtccggtacagaacactcaagaatttaagcgatccaggccctgcccacagcggtagagagatagtgtacagcaatggatccctgctgctccagaatgtcacctggaaagacactggattctacaccctacaaactgtgaatcgatattggaaaatggaactagcacacatttaccttcaggtggacaccccgtgctgtgaccctcttgactctgcccaactcaggatcgatccagtgactccgcatgctgctgaaggggaaagtgttcttctccaggtccataatctaccagaagatctgcaaaccttttcctggtacaagggtgtggatagcactccatcctttcaaattgtagaatatagcaaagcaatgaagtccatcatcagcggcagtgcatacagccgaagagagatagggtacactaatggatccctgctgctccaggatgtcactgagaaagactctggcttgtacacactagtaacaatagacagcaatatgagagttgaaacagtgcatgttcaagtcaacatctacaagcttgtgacacagcctgtcatgagagtctcggaaactacagttagagtacagagctcagtggtcttcacttgcttctcagacaacactggggtctccatccgttggctcttcaataagcagagtctgcagctcacagagaggatgagcctgtccccgtcaaagtgtcaactcaggatacatactgtgaggaaggaggatggtggagagtatcaatgtgaggccttcaacccagccaactctaagaccagtctcccagtcagcctggccgtgatgaatgagtgactctcatactatagcagggcagaggcatttctgtattgagatgtccacacctacctacccctgccagttacagatttccattctttcccatggacagttggccatgtctcctatccttccccatacctgatcctgaacccctccatgttgggagccgcccccacattcgccgtcacaagatggcgctgacatcctgtgttctaagtggtaaacaaataatctgcgcatgtgccaagggtattttaccactacttgtactctgcctttcccgtgacgtcagctcggccatgggctgcagccaatcagggagtgatgcgtcctaagcgaaggataactcctccttaaaggggacggggtttccgccattctctctctggctctggcgcctgctcgcttgctcctaaagatgtaaacaatagagctcttgctctggcgctctggcgcgctctggcgcgctctggcgcgctctggcgctctggctcctaaagatgttagaagggggctttcgtttttggggcttgggtttttgcgctcctgctcctgaagatgtaagcaataaagttttgccg

SEQ ID NO: 5 - DNA, 3019 bp, mus muscl
caaaatagctacgttacagaggagagttggaacgtgttctgggagtgggtgtgtttgtttgagttcagtgtgtgcagaaaaggcaagcctccgcagccattcacacacttctctcctcagcgatggctatgcagacagcagagctccagccctacatctctaaatgtgtgtctcacacttcccggtgctgagctctaaggctcccagtgacctcttgataatcagccttggctgggtccaaatccccaccccttggaaaagtcacggagcctgacgtctgtctgcctgtgagccgctttcagcaaagacctcacaagcagctactcaatctctcttggtagcaagttgccaaaccaggcccgtttcctcaaaagatggtagaggacttagcagcttcctatgttactctgaaattggagaatgaaattctgcaggctcaagtgaaaaggctcatggaagaaaatgctgccctccaggcccagataccagagctccagaaatccggagcagtcaaagagcatgaaccactccgaaagccctcagaggcccaagagcccccagagtccccagagttcccagcagccagggagtcacagaacccctgggaacccccagcaaccacagagcccggggagcccacaaagatcagagagcccagggaaccctcagccatcagtgagctcagggaacccccagagatcaaggagccccaggagcccccagagaccaatgagtctggagaatcctcagccatcacagagttcaggggatccccagagatcaaggagccccatttgcccccaaagtccaaggagtactggggacctcaggagcttccaatggtcaaggaatcctgggagcccccagaggccctggattccacagcctggaagccaccagcagtcaaggaatcccaggagatccagaaggctctggagtccccagcaacccagaggccccaggcgtccccaaggggttatgatctcccagcagtctgtgaggcggagcccacagacaaccagggtaccccagccctcaaggagcttcagagtccacagctccacaaccctacaaatgatgaggagtctcagacggttccagaataccaggagacctcatcacagctggagccccttgagcatccacctccccaggagactctggagcctcgggtgccccaggagcccctggacccctcagatgccgaggagtttctagaactctcagtacctgaagagtccctagagggcctgatagttgcgagaacaggaacagaacaggcccagtgtgaattagaggctacaactttgcccctagagtaccctttggccttcagtgaggattttcagaaactctctgagtttttagttcagttgaccagttacctgagaagcagagggtatcccactgaagcggctctagtgagctttgttggcagcttcttctcaggtgaggcgggaaggatgttccagcccttattagatagccaaccccccctggtggagcaatttgaaaggctcctgcgagcgctccaagatacttttgacaatccagaaagcttggaagttgctaaccagggcctccctcaacttcgccaaggggaaggccttgctcccaggtactcaacccgcttccatctcattgcgcaagagttagatttgggtgaaagcacgctctgcatccaatttcaagaagagcttgccagttctattcaaaatgaactgtcttgcacaagtccagccaccaacctatctgatgtgatcattgagtgtgtcaccctagaagagaaggcaagtggcggggttgattccagttcatcatcgtctgaagaggaaaatgggtccgagggtcctcccactgaaaaccaacctgttcaagctacaagtaatcgcccccacctcagcgaggctgaacgggcaagacgccgcgaaggccacttgtgcctctactgtggccatccaggtcattttgccagagactgccctgtcaagcctcatcgtgtccagcaggcgggaaacatggaggcccggcggtaagggggatcccgggcgggccaatctacaaatacgcgtccccctctcttcccatatctatgtcccgtaccctgtggctaactgtcgagattaggcttggaagacggcaattctttgagcaagcaatggtggattcaggctcctacagaaacagcatcgaccgctctgtggttcttcgagagaagataccaatccgcaataatatcttccctcttatgcttgaaacggtcgatgggcgtccgctgattaatggacccattaccaaagaaaccccacctgttgaagtaaaaattggaaaccacgttgaagagctccagtttgacattattcatgcaccacgctaccctctgattcttggaatccattggcttgagacccatgacccaaacatcgaatggagtacccgaactgtgtcatttccatcgcattactgtcattacaattgcttcaggcacaggtggaatcgaagacggcgtgatgaaataattgctggttagatggtgggtcctagtgacttctggccatctgtcttctgttacctcagctgtcatcagcatttgctgctctctgaatctttcactgaacctctggctatgaacgaaggctacctgtacaacgacgctgcctcttggatgatggactgaacctgacgactttgagctgcttttcctcaccaaccttgcatgcctccctctttgagccctgcattatgtagggctgtttttttttaatcgcaattctcactaacgatatgcatgcgaatagatattagaaactaatactgaaaactgtagttgttagaccgattttgttactttctagtcaaaattaccacatattttctggttttttttttcaataaaagcaattttcaagtgtatttttcagtaatcaataaacaatgggaagtgttaaaaaaaaaaaaaaaaaaaaaaaaaaaaaaaaaaaaaaaaaaaaaaaaaaaaaaaaaaaaaaaaaaaaaaaaa

SEQ ID NO: 6 - DNA, 2760 bp, mus muscl
agagccctgtctgcatccatcgcagcgaggaggctcgtgtggtgtggggcgggccaggagcaaggagaggccttcctccctttgtgctccccccacccagccctataaataggcccagcccaggctgtggctcagctcttggagggagttgagcaccaggcatccagcggttaagtcgaggtccctgccagcatggccagtgaaatcaagaagaagctcttctggagggctgtggtggctgagttcctggccatgaccctcttcgtcttcatcagcattggttctgccctaggcttcaattacccactggagagaaaccagacgctggtccaggacaacgtgaaggtgtcgctggcctttggtttgagcatcgctactctggcccaaagtgtgggtcacatcagcggtgctcacctcaaccctgcggtcacactggggctcctgctcagctgtcagatcagcatcctccgggctgtcatgtacatcatcgcccagtgtgtgggagccatcgtcgccacggccattctctcgggcatcacctcctccctagtcgacaattcacttggccgcaatgacctggctcacggtgtgaactctggccagggcctgggcattgagatcattggcactctgcagctggtactgtgcgttctggccaccactgaccggaggcgccgagacttaggtggctcagccccgcttgccattggcttgtctgtggcccttggacacctgctggcgattgactacactggctgcggtatcaaccctgcccggtcatttggctctgctgtgctcacccgcaacttctcaaaccactggattttctgggtggggccgttcattgggggtgccctggcagtgctcatctatgacttcatcctggccccacgcagcagcgacttcacagaccgcatgaaggtgtggaccagtggccaggtggaggagtatgacctggatgctgacgacatcaactccagggtggagatgaagcccaaatagaggaggcttggcctgggcatctatatgggggtggggcagggatgggcggagggaggggagggccgaaatcatattgtagacactctgacaagctgaccaaagtcactccccaagacctgcctgacccacatggtctagccttgtctggggcagtaatatcactgtctttctttctgtttcctggtctcagagcttcctggggaccaagatttatcaactcagcaccccactcctttgacatcatggaggagtgaaagtgagggacccacctgctagttgtcccctcagagtgtgctaggaagtccccctcattccaaagctgcccagcaagtcccccaccttaggtgcctgggattctgccaatgtcgctttgtgcctttgaccgcagccttccttggggtaggcaccttatctccaaaggcactttgagggagaggaggtcccctaactttcccctttggtctgacttacctccaggacccttccccttgaactcactctaagaccttggaattgtccctgtgctgaggcctcagtgatcacatctgtaaagtggcaaggaagggacagctttggggattctgtaagtgtggacatgccacaggttctagaagggacagtcttgacagcactgctttgtgtacccggcctgtactctttcccagcgtccacagcccacgagcacacgtggatgggccacggatcagagaatcagtgtgggatgcaagacgtgcctgttcacacacacagccttcctggaggcgggttagctgtagcagaacgaaggtcattttgtggtagaagaagagctcacactatcttacctagctctagtgggtctgcccgtgtaacatggccccgactggatgtttatttcggtcctccagtctcccttgcagtatagatctggtgtgtgtgtgtttgttaaagagcattgggctatgtgcagtgtcatgtctgaggagagaagcagctagctatgcaacagaccctggacagatgcccatgctgggcacacaagggtttggatgcccttagttcatcatgagcaaggaggtcactctggccctggcttgtgagctcctggctggatgagtgtgaccggagcctggacaatctgcagaggctcactctgtgcctccaggcacagtcttctctctgcattggcccaatgctacagcttgtgttgcagcccaaggacagctcagagtgcagtcagctcaggggttgcatttagctctaggtcattccattggatcccatcaatccagagtggctctaccactgtgcccttaaccacattgtgaaccgagagccacattcttcaggtgcttagaagcagcagaagagtcaggaggccactgaccactggcatatcacagctgcacactcgtctccgttccctagcagacactgtacccacttaacagataagggcactgaggacccatatgctcaactgtatcatattggatcaagcttagcagtcaaggccatgtttggccaccccatggtcaatgacgtggactcctctcacctccagcttctcagtttctgcctgggcaatggctaagggccaggggtgagggtgggggtggaggtggtgagagctttgctggagaggggcagggcaggcccatcccacctggttctggccattgtgaaccaggaccttgtatctgtctgctctgtgtatgtttctttgcaattgaatttcatcttatggtaagaaaataaaggacaatgacttgtaaggtc

SEQ ID NO: 7 - DNA, 3258 bp, mus muscl
aaagattgtgccccaaaaggtagagataagaagagatcacctccataccttaaatgattttcaaaagctgttgggagatattaattggctcagaccttttttaaagattcctccgctgagttaaggcctttgtttagtattttagaaggagatcctcatatctcctcccctaggactcttactctagctgctaaccaggccttacaaaaggtagaaaaggccttacagaatgcacaattacaacgtattgaggattcgcagcctttcagtttgtgtgtctttaagacagcacaattgccaactgcagttttgtggcagaatgggccattgttgtggatccatccaaacgtatccccagctaaaataatagattggtatcctgatgcaattgcacagcttgcccttaaaggcctaaaagcagcaatcacccactttgggcaaagtccatatcttttaattgtaccttataccgctgcacaggttcaaaccttggcagccgcatctaatgattgggcagttttagttacctccttttcaggaaaaatagataaccattatccaaaacatccaatcttacagtttgcccaaaatcaatctgttgtgtttccacaaataacagtaagaaacccacttaaaaatgggattgtggtatatactgatggatcaaaaactggcataggtgcctatgtggctaatggtaaagtggtatccaaacaatataatgaaaattcacctcaagtggtagaatgtttagtggtcttagaagttttaaaaacctttttagaaccccttaatattgtgtcagattcctgttatgtggtaaatgcagtaaatcttttagaagtggctggagtgattaagccttccagtagagttgccaatatttttcagcagatacaattagttttgttatctagaagatctcctgtttatattactcatgttagagcccattcaggcctacctggccccatggctctgggaaatgatttggcagataaggccactaaagtggtggctgctgccctatcatccccggtagaggctgcaagaaattttcataataattttcatgtgacggctgaaacattacgcagtcgtttctccttgacaagaaaagaagcccgtgacattgttactcaatgtcaaagctgctgtgagttcttgccagttcctcatgtgggaattaacccacgcggtattcgacctctacaggtctggcaaatggatgttacacatgtttcttcctttggaaaacttcaatatctccatgtgtctattgacacatgttctggcatcatgtttgcttctccgttaaccggagaaaaagcctcacatgtgattcaacattgtcttgaggcatggagtgcttgggggaaacccagactccttaagactgataatggaccagcttacacgtctcaaaaatttcagcagttctgccgtcagatggacgtaacccacctgactggacttccgtacaaccctcaaggacagggtattgttgagcgtgcgcatcgcaccctcaaagcctatcttataaaacagaagaggggaacttttgaggagactgtaccccgagcaccaagagtgtcggtgtctttggcactctttacactcaattttttaaatattgatgctcatggccatactgcggctgaacgtcattgttcagagccagataggcccaatgagatggttaaatggaaaaatgtccttgataataaatggtatggcccggatcctatcttgataagatccaggggagctatctgtgttttcccacagaatgaagacaacccattttgggtaccggaaagactcacccgaaaaatccagactgaccaagggaatactaatgtccctcgtcttggtgatgtccagggcgtcaataataaagagagagcagcgttgggggataatgtcgacatttccactcccaatgacggtgatgtataatgctcaagtattctcctgcttttttaccactaactgggaactgggtttggccttaattcagacagccttggttctgtctggacaggtccagatgactgacaccattaacactttgtcagcctcagtgactacagtcatagatgaacaggcctcagctaatgtcaagatacagagaggtctcatgctggttaatcaactcatagatcttgtccagaaacaactagatgtattatgacaaataactcagcagggatgtgaacaaaagtttccgggattgtgtgttatttccattcagtatgttaaatttactaggacagctaatttgtcaaaaagtctttttcagtatatgttacagaattggatggctgaatttgaacagatccttcgagaattgagacttcaggtcaactccacgcgcttggacctgtcgctgaccaaaggattacccaattggatctcctcagcattttctttctttaaaaaattgggtgggattaatattatttggagatacactttgctgtggattagtgttgcttctttgattggtctgtaagcttaaggcccaaactaagagagacaaggtggttattgcccaggcgcttgcaggactagaacatggagcttcccctgatatatctatgcttaggcaataggtcgctggccactcagctcttatatctcacgaggctagtctcattgcacgagatagagtgagtgtgcttcagcagcccgagagagttgcaaggctaagcactgcaatggaaaggctctgcggcatatatgagcctattctagggagacatgtcatctttcatgaaggttcagtgtcctagttcccttcccccaggcaaaacgacacgggagcaggtcagggttgctctgggtaaaagcctgtaagcctaagagctaatcctgtacatggctcctttacctacacactggggatttgacctctatctccactctcattaatatgggtggcctatttgctcttattaaaagaaaaagggggaactgtgggaagccgcccccacattcgccgtcacaagatggcgctgacatcctgtgttttaagttggtaaacaaataatctgcgcatgagccaagggtatttacgactacttgtactctgtttttcccgtgaacgtcagctcggccatgggctgcagccaatcagggagtgatgcgtcctaggcaattgttgttctcttttaaatagaaggggtttcgtttttctctctctcttgcttcttacactctggccccaaaaagatgtaagcaataaagctttgccgc

SEQ ID NO: 8 - DNA, 1626 bp, mus musc
ccacgcgtccgcttcctcgctccctctctttctctcctccctctgccttcccagtgcataaagtctctgtcgctcccggaacttgttggcaatgcctatttttcagctttcccccgcgttctctaaactaactatttaaaggtctgcggtcgcaaatggtttgactaaacgtaggatgggacttaagttgaacggcagatatatttcactgatcctcgcggtgcaaatagcttacctggtgcaggccgtgagagcagcgggcaagtgtgatgcagtctttaagggcttttcagactgtttgctcaagctgggcgacagcatggccaactacccgcagggcctggacgacaagacgaacatcaagaccgtgtgcacatactgggaggatttccacagctgcacggtcacagctcttacggattgccaggaaggggcgaaagatatgtgggataaactgagaaaagaatcgaaaaacctcaacatccaaggcagcttattcgaactctgcggcagcagcaacggggcggcggggtccctgctcccggcgctttccgtgctcctggtgtctctctcggcagctttagcgacctggttttccttctgagcgcgggaccgggtccccccctccccctccgctcactcacccacactcacaccatgctcccggaaatcgagaggaatagccattcgttctctgaggacgttgtgattctctgtgatgttgaaaacactcatatgggattgtgggaaatcctgtttctctctttttcttcttcttttttttttcttctttttaattgtgtttgattccttgtgttttatttgccaaatgttaccgatcagtgagcgagcgagcacagccaaaatcggacctcaccttttagtccgtcttcacagaaaaataagaaaacggcaaactcacccccatttttaaatttttattttattttattttattttggcaaaagaatctcaggaatggccctgggccacctactatattaatcatgttgataacatgaagaatgatgggctcctcctaatgggaaagcgagagggaaaaggagaaggccaggggaatgacttcaagagtggtgtccacgtgggaatcagccggtgaataatcatgctcacgtctttcttccacagtaccttgttttgatcatttccactgcacatttctcctccagaaaagcgaaaacacaagagtgtgggcttagcatttttttaaggataagacagagagagagaaagaggttgggtatagtgggataggttgtcataagagatgctgctatggtcatgaggggccggtttcacctgctattgtcgatgcccctcgttcaggtccactgcctttattttccttcctctcttgttttagctgttacacatacagtaatacctgaatatccaacggtatagatcacaagggggtaatcaatgttaaatctaaaatagaatttaaaaaaaaagattttgacataaaagagccttgattttaaaaaaagagagagatgtaatttaaaaagtttattataaattaaattcagcaaaaatttgctacaaagtatagagaagtataaaataaaagttattgtttgaaaaaaaaaaaaaaaaaaaaaa

SEQ ID NO: 9 - DNA, 1136 bp, mus musc
ctcggctggcggccccactccagtccgaacacatgtgcccgcctcacccggcagccgccaccgcggggcgcagcggagacccctggcccggcggcctgtggggacctaaagaggcggcatgagcagcgcacggtggagctgacgccgcgccccctgcccggcccatgtccttcgccatgctgcgttcagcgccgccgccgggtcgctacctgtaccctgaggtgagcccgctgtcggaggatgaggaccgcggaagcgagagctcgggctccgacgagaaaccctgccgtgtgcatgctgcgcgctgtggcctccagggcgcccggcggcgggcaggaggacggagggccgcgggtagcgggccaggacccggggggcggccaggccgcgagccccggcagcggcacacagcgaatgcgcgcgagcgggaccgcaccaacagcgtgaacacggccttcactgcgctgcgcacactcatccccaccgagccagcggaccgcaagctctccaagattgagacgctgcgcctggcctccagctacatttctcacctgggcaatgtgctgctggtgggtgaggcctgtggcgacgggcaaccatgccactcgggacccgctttcttccacagcggtcgtgcgggcagcccactgccaccgccgccgccgccaccaccactggccagagacggcggcgagaacacccagcccaaacagatctgcaccttctgcctcagcaaccagagaaagttgagcaaagaccgtgacagaaagacggcgattcgaagttagaaggaggagggtccacagcagccaagaggtgatgccactagtgaaggtggatgccactgaagagtcacggagagccccactttggacctgatctgagcgcaggtccccaagagcacgctcaccaggccagacctgccccagctatgagcagggcctatgaacagagagatggacaggcgggtgatggcttgactctaagcagccgaacactgacccaggcccactgggactttccatgctggctctctacctgggccaagtgttggcatcttgtgtctttaatatgataatataaagtctggaaattttgtataattaaaaatgaaacagtatcttccaaattgaggc

SEQ ID NO: 10 - DNA, 1506 bp, mus musc
taaaagggcaagggatttctagttccttaagggatcaactgtccactcttgctcactcacatctcctgtggtgcagccatggccatgcaaaaaatcttcgcccgggaaatcctggactccaggggcaaccccacggtggaggtggacctgcacacagccaagggtcgattccgagcagctgtgcccagtggagcttccacgggtatctatgaagcactggaactccgagatggagacaaagcacgatacctggggaaaggagtgctgaaggctgtggaacacatcaacaagactctaggtcctgctctgctggaaaagaaactaagtgttgtggatcaagaaaaagttgacaagttcatgattgagctggacgggaccgagaataagtccaagtttggggccaacgccatcctgggtgtgtccctggctgtctgcaaggctggagcagctgagaaaggggtccctctctaccgacacatcgcagatcttgcaggcaatcccgacctcgtactccctgtgcctgcctttaatgtgatcaacggcggctctcatgctggaaacaagctggccatgcaggagttcatgattctgccagtgggagccagctctttcaaggaagccatgcgcatcggcgctgaggtctaccaccacctcaagggggtcatcaaggccaagtatgggaaggacgccaccaacgtgggggatgagggtggctttgcacccaacatcctggagaacaatgaggccctggagctgctaaagacagccatccaggcagccggttacccggacaaggtggtgatcggcatggatgtagctgcgtctgaattctaccgcaacggcaagtatgatctggacttcaagtcacccgatgaccctgccaggcacatcagtggggagaagcttggggagctgtacaagaacttcatccagaactatcccgtggtctccattgaggacccctttgaccaggatgactgggccacatggacctcattcctctctggggtggacatccagattgtgggagatgacctcacggtaaccaaccccaagaggattgctcaggctgtggagaagaaggcctgcaattgcctgctcctgaaggtcaaccagatcggctccgtgacggagtccatccaggcctgtaaacttgcacaatctaatggctggggagtgatggtgagccaccgctctggggagaccgaagacactttcatcgctgaccttgtggtgggactctgcacaggacagatcaagactggtgctccctgccgttcagagcgtctggcaaaatacaaccagcttatgaggattgaggaggctcttggggacaaagctgtctttgctggaagaaagttccgtaatccaaaggccaaatgaggagctggagactccaggctttcacaggaaagacacaggccttcaagcccttctcccagaaataaacactgccaaaccagaaaaaaaaaaaaaaaaaaaaaaaaaaaaaaaaaaaaaaaaaaa

SEQ ID NO: 11 - DNA, 1680 bp, mus musc
atggccgtgcgtaggcacattaagaaaaagctaggcagtcggcttcaaggtccgccctatgcggagtccccgccctgcgtagtgcgtcagcagtgcgcagagaggcagtgcgcagagaggcagtgcgcagactcattcattcccagagaggaacaaaggaaaatacaacaggcatttccagtctttgaaggagccgagggtgggcgtgtccacgctccggtagaatacttacaaattaaagaaattgccgagttggtccgtaaatacggaaccaatgctaattttaccttggtgcagttagacaggctcgccggcatggcactaactcctgctgactggcaaacggttgtaaaagccgctctccctagtatgggcaaatatatggaatggagagctctttggcatgaaactgcacaagcgcaggcccgagcaaacgcagctgctttgactccagagcagagagattggacttttgacttgttaacgggtcagggagcttattctgctgatcagacaaactaccattggggagcttatgcccagatttcttccacggctattagggcctggaaggcgctctcccgagcaggtgaaaccactggtcaattaacaaaagttgtccagggacctcaggaatccttctcagattttgtggccagaatgacagaggcagcagagcgtatttttggagattcagagcaagccgcgcctctggtagaacagctaatctatgagcaagccacaaaggagtgccgagcggccatagccccaagaaagaacaaaggcttacaagactggctcagggtctgtcgagagcttgggggacctctcaccaatgcaggcttagcggccgccatcctccaatctcagaaccgctccatgagcagaaatgatcagaggacatgttttaattgcggaaagcctgggcattttaagaaagattgcagagctccagataaacagggagggactctcactctttgctctaagtgtggcaagggttatcatagagctgaccagtgtcgctctgtgagggatataaagggcagaattcttcccccacctgatagtcaatcagcttatgtgccaaaaaacgggtcatcgggccctcggtcccagggccctcaaagatatgggaaccggtttgtcaggacccaggaagcagtcagagaggcgacccaggaagacccacaaggtaaaggagataggatagctcagctgctgctcctccctgataataccagggagaaatctgcaggacctgagataaagaaaatgggctcctcaggaaatgattctgcctatttggttgtatctttaaatgatagacctaagctccgccttaagatcaacggaaaagagtttgaaggcatccttgataccggagcagataaaagtataatttctacacattggtggcccaaagcatggcccaccacagagtcatctcattcattacagggcctaggttatcaatcatgtcccactataagctccattgccttgacgtgggaatcctctgaaggacagcaagggaaattcataccttatgtgctcccactcccggttaacctctggggaagggatattatgcagcatttgggccttattttgtccaatgagagagcagcgttgggggataatgtcgatatttccactcccaatgacggtgatgtataa

SEQ ID NO: 12 - DNA, 3342 bp, mus musc
gatctccatcggaaagtgcgctggctacatcccttcggcctccgggcagtgttctgtctcccttagctcaggcagcgagaaacttcagctgcgaagtggtggtggagagagccctgggagcagcgactggacccggacaccaagaagagagtggacgcgcccctcgactaggaatcgctctcgcaggcggagacccagcatctcagcgcctgcggtcgcgcttgcccggccgcgcgcttttgctaggcgccgccagccccgaggaccctcggggtccgcggacccttctgcagccggcggaatcctaaagctgccaagagctcccggcgggtgtccgcaaactttttccgagcccacgtgctgaccaaacagcccggctcgcttccagagcctggcatggagcgctgcgcctaggcacgccgtgcagcccgagagacgcgagcgcacggtaggcgatctacacctggtgctggggcgctgggatagcccatccggggagcgaaaggcttcagagcgccccttgaaagccctgcgctcggctgcttctagagcgcctttccttctgcagagctcgcacaacgccctttctccagggtcagaaggcagtgctccgcagaggttgctaattcactgattgtaatcaccttcctctccaagtctcctgcagctgtgccatctgcgttaaactgctgcgtggatcgtgccagttcaccgtggagggagagatgctcatcgagccaaattgatcattgcagccgcagggcagtgacatctgtctctaagtcctccctaggagcgcgacccgcactgtctccttccaggagcccgtcatttcctcgacttttgagaggtgtctctccccagcccgaccgtccagatgcgtttttgcctcttctcatttgccctcatcattctgaactgtatggattacagccagtgccaaggcaaccgatggagacgcaataagcgagctagttatgtatcaaatcccatttgcaagggttgtttgtcttgttcgaaggacaatggttgcagccgatgtcaacagaagttgttctttttccttcgaagagaaggaatgcgtcagtatggagagtgcctgcattcctgcccatcagggtattatggacaccgagccccagatatgaacagatgtgcacgatgcagaatagaaaactgtgattcttgctttagcaaagacttttgtacgaagtgcaaagtaggcttttatttgcatagaggccgctgctttgatgaatgtccagatggttttgcaccgttagatgagactatggaatgtgtagaaggttgtgaagttggtcattggagcgaatggggaacgtgtagcagaaacaaccgcacgtgtggatttaaatggggtctggaaaccagaacacggcagattgttaaaaagccagcaaaagacacaataccatgtccgaccattgcggagtccaggagatgcaagatggccatgaggcactgtccaggaggaaagagaacaccaaaggcaaaagagaagagaaacaagaagaagaggcggaagctgattgagagagcccaagagcagcacagcgtcttcctcgctacagacagagtgaaccaataaaatacaagaaatagctggggcattttgaggttttctgttttgtttatgttgttgttttgcaaaagtgcacaaagctactctccagtccacactggtggacagcattcctgatcctctgaccagtatccattttcagtaatgctgcagagggaggtgcccaagcatggactcagcgttatttatgctttgattggaatctggggcctgtgatggcaggagcttgttgagctgagtcagcgggagctgatgcatctgtactcttgtgatgagcacagtgtgtcataagaacctgtccctggcacggtggacccacaggaggcacaaggctgtagatcaccaccagagaatgcacctgtgcctattttgatggatggcaatgctaagcaagcaagcactgttcacttgtgactttcatttctcacactgtgcactgtcaaagacaaatgtgcatggaaaaatgttttagtgtcacctcatggcgttctcagcatcagtgaccttcaaacggtcctacaatgagactgtgttctagctaggggtatgctgtggaaattcctgctacatttcatcttagtgctaacatgtacagattctgctgcgctacattcaaagctcattactgtatatttatgctttctctgtgtaacaagttatacctgataagatgtcactttgtttctagtggttcttaaccatggtctggtacatggctattctagttttggaaattaacaagtgttttgttgcctcttgttttcttttgttcctatcatttttggcgggggtggggtgggcttgattctaaccgtaagtataggataagctagttttgtatatagagtcaaatgactgatgtcagaggatcagtgctgatagaacttccccagttcatgtcaccatacacacagagagaaagcagcatgaggcatcttgccatcagaagcccaatttcttttgagtcccaaaattgatgacttatgaaatatagctgaaaacaagatttgggtgtagttacttgtatttattatacaatttccaattacattttttttcaaactcaaaataacccatgactttgagtgataggtcacttggcaatgttcttgaattactggggaagctgttgtcactaagataatgagagagaaaatagaatggcttcgcccaagtgagagccacatcttacatttctctgttgaatcggaatcaactatattagaacagaagcctgatggaagctttctagttaacacacacaaggccatggtttcaaaaacatctttgtccccttaggtcagtttgtccttagattatgaattggcaggttctaattgcattatttccctggctgatccaggaaaaagttagaacaaaataagttgcatagttttgaggaaacatccaaagcaaggcgaagcctttccttgccttgcattggcaaaactacctctttagcatttatgttgattcagaaacatcttgctgatatgtgtagatgttttaagcttcattgtgaaaatattgatgcaagataagccatatatgaatgttgtattcaactttagggcttgaaattaatcctaaagtgttcacctctctccatgtctatttacactctgttcctatttactaagagggtaggggtctccttaatatcatacttcattgttaataagtcaatgcttgttatgtttcttggctgttgtttttgtgcattaaaaactcaaaaatcg

SEQ ID NO: 13 - DNA, 3522 bp, mus musc
caggcaaatgcaacatgctctccagcctggggtgtctacttctctgtggaagtattgcacttgctctgggaaatgcacagaaattgccaaaaggtaaaaagccaagcttgaaagtgcacatcaataccaccagcgactccatcctcttgaagttcctgcgtccaaatgcaaacgtaaagctggaaggttttctcctgggatatggcagcaatgtgtctccaaaccagtacttccctcttcccacagaagggaaattcacagaggctgtagttgatgcagagccgaagtatctgatagtcgtacgacctgctcctcctcccagccagaagaagtcatgttcagggaaatctcgccctcgcaaacccctccagctggtggtgggtacgttgacaccgagttctgtcttcctgtcctggggattcctcatcaacccacaccatgactggacattgccaagccactgtcccagtgacagattttatacaattcgatatagagaaaaagataaagaaaagaaatggatttttcaactctgcccagctactgaaacaattgtggaaaatctaaagcccaacacagtttatgaatttggtgtgaaagacaatatagaaggtggaatttggagtaagattttcaatcataagactattgttggaagtaaaaacaaagtaaacgggaaaatccaaagcacttatgaccaggtccactcagtgccagtcccgaggaagctaatcccactaacgatcattaagcaagtgattcagaatgttactcacagggcttcaaccaaatccccagacaagactccttttgggggaacaatattagttcatctgattattccgggtcttaatgaatccactgtaaaacttcccacatccataatgcttgagatttccgatgctctcaaggcacaattagctaagaatgaaacattggctttaccagcagaatctaaaacaccagaggtcgaaaaattggcagggcagccagtaacagtgactccggaatcagtttcaagaagcactaagcccaccctgtctagtgctttagacactgcagagacagcactggtcctcagtgagaagacgtcagaaacagcccgctctgttctaatacctgagtttgaattgcccttgagcactttagctccaaaaaggttcccagagtttcctgaggcaaaaacagccttcccattggagaaacctaggggttcctgggcttcaagtgaggagccatgggtggtacctggagctaaaacatctgaagattccagagtcgtacagcctcaaactgcaacttatgatgttatctcaagctcaacaacttctgatgagactgaaatagagattcacacagcaacaagagatcctattctggactctgtcccacctaaaacttctagaactgctgaacagccaagggcaacactggctccaatcgaagcgttatttgaatcccgaaatgtggaaatcttcaccagtcctgaagtgcgacctacaacggctgctcctcagcaaactacatctatcccttccacacccaaacgacaatcaacacccaaaccgccaagagtcaagcctgcacccaggcagacaaccagcatgcctcccaagctcaaaacaccacactcaaggatgccagcaaaagagccagttcctaaggaacccctgcatacgacttcaaagccaaaaatgccaccaagtcctgaagtggcagacactacatctgcacctttagagacacggggcattcctctcatacctgtgatttcaccaagacctagtcaagaggaactacaaaccgccatggaagaaacagaccagtctacccaagagctcttcacgactaagattccacgaacaactgaattggcaaagacaactcaggcaccacacagattgcatacagctcctgtgaggcccagaatacctggcaggccacatggcaggcctgctctgaacaaaacaactacaaggcctgataaaaccaaacccagagggacgtcccataaaaacggagtaggaacaggaaccaagcaagcacctaagccaccaagtcctgggagaaatgcgtcagtggattcacatgccacaagaaaaccaggctcagtctcagggacgcgtcgtccacccataccacataggcattcgtccactagacctgtgtctccagagagaaggcctttacccccgaataatgtcaccgggaagccaggacgtgcgggaattgtttcctccagccgggtaacgtccccacccctgaaggcaacactccaccctatcggaacagccacagcgagaccaggggcagaacaaaaggaaccaactgctcctgcttcagaagaagagtttggtactacaactgacttcagttcaagtcccaccaaagaaactgatccccttgggaagcccaggttcataggtccccatgtgcgatatatcccaaagcctgaaaacaagccctgttccatcactgactcagtcagacggttccctacagaggaagccacggaggggaatgccaccagcccaccacagaacccacccaccaacctcactgtggtcactgtcgaaggctgcccctcatttgtcatcttggactgggaaaaacctctaaatgacactgtcactgaatatgaagtcatatccagagaaaatgggtcattcagtgggaagaacaagtccattcaaattaccaatcaaacgttctctacagtagaaaacctgaaaccagatacaagctatgaattccaggtgaaacccaaaaatccacttggtgagggccccgccagcaacacggtagcgttcagtactgaatcagctgacccaagagtgagtgagccaatttctgcaggaagagatgccatctggactgaaagaccttttaactcagactcttactcagaatgcaaaggcaaacagtatgttaaaaggacgtggtataaaaaatttgtcggagtgcagctatgtaactctctcagatacaagatttatttgagcgattccctcacaggcaagttttacaacataggagatcagaggggccacggagaagatcactgccagtttgtggattcatttttagatggtcgcacaggacagcaactcacctctgaacagttacccaccaaagaaggctatttcagagctgttcgtcaggaacctgtccaatttggagaaataggtggtcatacccaaatcaattatgtccagtggtatgaatgtgggaccacaatacctggaaaatggtagatgcaacaaaattatttccaaagtacttctggttcattatcgcaaaaagaaacaatcgcataacaaaaagaacccattggaaatagtggtgtttgccacccctattcgaagctgtttttgttcactatgtgtaagtttgcaatctgagagcagtaccggatgtttattattagaaaagattactgaggatatttatcaggttttacaaagtcatttttaaaaagcaagattaacattaatagaataacattttagggaagctggctcc

SEQ ID NO: 14 - DNA, 2127 bp, mus musc
ttttaccatccagaccagagtcaggccacagacggacatggctgctcaaggctggtccatgctcctgctggctgtccttaacctaggcatcttcgtccgtccctgtgacactcaagagctacgatgtctgtgtattcaggaacactctgaattcattcctctcaaactcattaaaaatataatggtgatattcgagaccatttactgcaacagaaaggaagtgatagcagtcccaaaaaatgggagtatgatttgtttggatcctgatgctccatgggtgaaggctactgttggcccaattactaacaggttcctacctgaggacctcaaacaaaaggaatttccaccggcaatgaagcttctgtatagtgttgagcatgaaaagcctctatatctttcatttgggagacctgagaacaagagaatatttccctttccaattcgggagacctctagacactttgctgatttagctcacaacagtgataggaattttctacgggactccagtgaagtcagcttgacaggcagtgatgcctaaaagccactcatgaggcaaagagtttcaaggaagctctcctcctggagttttggcgttctcattcttatactctattcccgcgttagtctggtgtatggatctatgagctctcttttaatattttattataaatgttttatttacttaacttcctagtgaatgttcacaggtgactgctcccccatccccatttcttgatattacatataatggcatcatatacccctttattgactgacaaactactcagattgcttaacattttgtgcttcaaagtcttatcccactccactatgggctgttacagagtgcatctcggtgtagagcaaggctccttgtcttcagtgccccagggtgaaatacttctttgaaaaattttcattcatcagaaaatctgaaataaaaatatgtcttaattgagactcagtgggatatgcatgtaataccagcacttgggaagttaacgcaagaagatcatgaattcaaggctagcctggagtacatagtcagttacagactaacttgggctatagggacactgtgcttcaaacacacacacacacacacacacacacacacacacacacacacacacacacacaccagtggtggatgggtagatgaggtgatatcaattgtatagcataaatattttaaaatttaaaatgtacttttcaggtttttagtttgcatttgtgtgtgtatgtgtgtctgtttgtgtgtgtgaatatgtatgtgcaaaacttcaggtgtcagttctcaattcccaccttgaggcaagatccctctgttgtttttacaccaagaatgtcaggctaggtggccatgacatctcagggagcctcctgtcactgtaggaacactggggttacagatatatttgcttttggctttgcgttgattctgggaactcaaaccttggtcttcctgcttgaatggcttgaatactagtcatatttccaaaccaatcactttttagtaaatttttaattgagaaaaccttgtagataacatttgtcaagattataggcaaacgaaaatgtggatgggaacaacgataggaaatcaaggctttccacatttgaggacgataatcaggacaccgctgcagacaagtgaggtgcagagagacagagataccgccacgttctgaccacttagcttcttcctgacagaaatttggcatatataacaccaataaatattaaataaccaaacatccactttctgcttgtcatttcagatgaaagagtgtgttacaagatgaatgatattaccttggagccaaggcaagaacactgtgtccaaagaggactgtgtgtaggctttctctagccaactcttttgtgtttgcctttttctgtgaaccggatgcctctccatttcctgcttagtctttctgctttgctgttctgcatggacagtcatccacccatttttagttttgaaagaggtgttactgatcatgttgctttgtttgtacacattggttcaactacctatagctcagagcctctttccccatggctcaagtgaggccgttctgtggtctgtcattgcagaataaagaaatagattatagtgat

SEQ ID NO: 15 - DNA, 2447 bp, mus musc
gacagcagctgcagctccgccgccatgggccccactgcctgcgttctagtgctcgccctggctatcctgcgggcgacaggccagggccagatcccgctgggtggagacctggccccacagatgctgcgagaacttcaggagactaatgcggcgctgcaagacgtgagagagctgttgcgacagcaggtcaaggagatcaccttcctgaagaatacggtgatggaatgtgatgcttgcggaatgcagcccgcacgcactccaggcctgagcgtgcggccagtgccgctctgcgcacccggctcctgcttccccggcgtagtctgctccgagacagctacgggcgcgcgctgcggcccctgccctcctggctacaccggcaacggctcgcactgcaccgacgttaatgagtgcaatgctcacccctgtttcccgcgggtgcggtgcatcaataccagccctggctttcactgcgaagcctgtccccctgggttcagcggacccacccacgagggcgtgggactgaccttcgctaagtccaacaaacaagtttgcacggatattaatgagtgtgagaccgggcagcacaattgcgttcccaactccgtgtgcgtcaacacccggggctccttccagtgcggcccctgccagcccggtttcgtgggcgaccagacgtcaggctgccagcggcgtgggcagcacttctgccccgatgggtcacccagcccgtgccatgagaaagcaaactgcgtcctggagcgggatggctcgaggtcttgcgtgtgtgcagttggctgggccggcaacgggctcctgtgcggccgcgacacggacctggacggttttcctgacgagaagcttcgctgctcagagcgccagtgtcgcaaggacaactgcgtgacggtgcccaattcggggcaggaggatgtggaccgggacggcatcggagatgcttgtgacccggatgcggacggggatggagtccctaacgagcaagacaattgcccgctggttcgaaacccagaccagcgtaactcggacagtgataagtggggagatgcctgcgacaactgccggtccaagaagaatgacgatcagaaagatacagacctggatggccggggcgatgcctgcgacgacgacatagatggcgaccgaatacgaaatgtagctgacaactgtccccgggtgcccaactttgaccagagtgacagtgatggtgatggtgttggggatgcctgtgacaactgtccccagaaagataacccagaccagagggatgtggaccacgactttgtgggtgatgcctgtgatagtgaccaagaccaggatggggatggtcaccaggactcccgggacaactgccccacagtacccaacagtgcccagcaggactcagatcatgatggcaagggcgatgcctgtgatgacgatgatgacaatgacggagttcctgatagccgggacaactgccgcttggtgcctaaccctggccaagaggacaatgaccgggatggcgtgggtgacgcgtgtcagggtgacttcgatgctgacaaggttatagacaagatcgatgtgtgccccgagaacgccgaggtcaccctcaccgacttcagggccttccagacggttgtgttggaccccgagggtgatgcgcagatcgatcccaactgggtggtgctcaatcagggaatggagatcgttcagaccatgaacagtgaccctggcctggctgtgggttacacagccttcaacggcgtggacttcgagggcacattccatgtaaacaccgccactgatgatgactatgctggtttcatcttcggctaccaagacagctccagtttctacgtagtcatgtggaaacagatggagcagacgtactggcaggccaatcccttccgggctgtggctgagccagggattcagctcaaggctgtcaagtcctctacaggtcccggggaacagctccgaaacgcactgtggcacacgggggacacagcatcccaggtgcggctgctgtggaaggatcctcgaaacgtgggctggaaggataaaacatcctaccgctggttcctgcagcaccggcctcaagttggctacatcagggtgcggttctatgagggtcctgagctagtagctgacagcaatgtggtgttggacacggccatgcgtggtggccgcctgggtgtcttctgcttctcccaagagaacatcatctgggctaacctgcgctaccgttgcaatgatacaatccctgaggactacgagagtcaccggctgcagagagtctagggaccagtggggtcccgctgcctgatggactgtggtggcacaagctacgggtgtgtgtgtgggggggtctggcatccctctgaaggggtgtctggcctggggaggagaggcaaataaagtacgtatgtgggggaaaaaaaaaaaaaaaaaaaaaa

SEQ ID NO: 16 - DNA, 874 bp, mus musc
gggtcccgcagtcctaccagggccgccaggggtcgttgcatctcccctgcacttcctccggtccttcccaccccacgcggttgttggcgccagactcaaacagggaggccgcctcgcgcagcatgtcaaagaaaagaggactgagtggggaggaaaagagaacccggatgatggagatattttttgagacaaaagatgtattccagctgaaagacctggagaagcttgctcccaaagagaaaggcataaccgccatgtcagtgaaggaagtccttcagagcctagtggatgacggtatggttgactgcgagaggatcgggacgtccaattactattgggcttttccgagcaaggctcttcatgccaggaagcgcaagttggaggctctgaactctcagctgtcagagggaagccagaagcatgcagacttacagaagagcattgagaaagcaagagttggccggcaagagacggaagaacgagccatgcttgcaaaagaactttcttcatttcgagaccaaaggcaacaacttaaggcagaagtggaaaaatatcgagaatgtgacccacaggttgtggaagagatacgtgaagcaaataaagtagctaaagaagccgccaatcgatggactgataacatatttgcaataaaatcctgggccaaaagaaaatttgggtttgaagaaagtaaaattgataaaaactttggaattccagaagactttgactacatagactaaaatgttggtgctaaacaaggatctgggagcttgtgaatatgtcaaggtttaaacagctaactaatgttacccagttatcatctatctgctaattgtttaccgttttgaagctttaaataaagtatacaataagg

SEQ ID NO: 17 - DNA, 894 bp, mus musc
gcttctgtcattttcagctctcaggtggttactctgatggcctcatggtcctgcctgaaacagaaagtctgccacctacttctgtagcagcaagactcctgttctgtggctaagcttcctgcctgtgcaagagccacagggaggggccaaatgcatgccactggggccacgcctcctggtaaagacataaatagtgatcctcgggactggtcatcagagctcccctgccttcaccatgaagtcctgcggccttttacctttcacggtgctccttgctctggggatcctggcaccctggactgtggaaggaggcaaaaatgatgctatcaaaatcggagcctgccctgctaaaaagcctgcccagtgccttaagcttgagaagccacaatgccgtactgactgggagtgcccgggaaagcagaggtgctgccaagatgcttgcggttccaagtgcgtgaatcctgttcccattcgcaaaccagtgtggaggaagcctgggaggtgcgtcaaaactcaggcaagatgtatgatgcttaaccctcccaatgtctgccagagggacgggcagtgtgacggcaaatacaagtgctgtgagggtatatgtgggaaagtctgcctgcccccgatgtgagcctgatccctgacattggcgccggctctggactcgtgctcggtgtgctctggaaactacttccctgctcccaggcgtccctgctccgggttccatggctcccggctccctgtatcccaggcttggatcctgtggaccagggttactgttttaccactaacatctccttttggctcagcattcaccgatctttagggaaatgctgttggagagcaaataaataaacgcattcatttctctatgcaaaaaaaaaaaaaaaaaaa

SEQ ID NO: 18 - DNA, 1442 bp, mus musc
agggaagacagggcgccctcggaaggacaggatgtcatcaggaaaacaggactccccgtgggaagataggatacctccaggaagatagaatagtcccaggcatcactagaacagcaggaaacactagggtccaagctctcattgaggcacccggggaggttgttgggttgtgggcggggctcaggaaagactgtccctgctggtcctgatccacgaccacccacccggcaaggttctctctaagagaaccttgtcagagacagaacgggtccctacaggcgcgttcttctctcctacagcccatggcgcggttcctgaggctttgcacctggctgctggcgcttgggtcctgcctcctggctacagtgcaggcggaatgcagccaggactgcgctaaatgcagctaccgcctggttcgcccaggcgacatcaatttcctggcgtgcacactggaatgtgaaggacagctgccttctttcaaaatctgggagacctgcaaggatctcctgcaggtgtccaggcccgagttcccttgggataacatcgacatgtacaaagacagcagcaaacaggatgagagccacttgctagccaagaagtacggaggcttcatgaaacggtacggaggcttcatgaagaagatggacgagctatatcccatggagccagaagaagaagcgaacggaggagagatccttgccaagaggtatggcggcttcatgaagaaggatgcagatgagggagacaccttggccaactcctccgatctgctgaaagagctactgggaacgggagacaaccgtgcgaaagacagccaccaacaagagagcaccaacaatgacgaagacatgagcaagaggtatgggggcttcatgagaagcctcaaaagaagcccccaactggaagatgaagcaaaagagctgcagaagcgctacgggggcttcatgagaagggtgggacgccccgagtggtggatggactaccagaagaggtatgggggcttcctgaagcgctttgctgagtctctgccctccgatgaagaaggcgaaaattactcgaaagaagttcctgagatagagaaaagatacgggggctttatgcggttctgaagcccttttccagcagtgaccccgacccccactagcctgctccatcccccatgagcaactgccttgtcaatgatgtttcttgtcacatgctgctttgtgctgtacagttgcccccgtggtctagataactacactgcctgaaagctgtgattttagggtctgtgttcttttgagtcttgaagctcagtattggtctcttatggctatgttgttatcaatagtttgttacctcatctctcctgacgaaacatcaataaatgcttatttgtatataaatataataaacccgtgaccccaactgcagaaaaaaaaaaaaaaaaaaaaaaaaaaaaa

SEQ ID NO: 19 - DNA, 2482 bp, mus musc
atgagccgctcggggacttgggacatggatgggctgcgggcggacggcggggccgctggggcggcaccggcctcctcctcctcctccgtagcagcgcctggccagtgtcgcggcttcctgtcggcgccggtgttcgcggggacacattccggacgcgcggcggcggcggccgcagcagcggcggcggcagcggcggcagcatccagcttcgcttacccagggacctctgagcgcacaggctcttcgtcgtcgtcgtcatcctcggctgtgatcgccactcgccccgaggctcctgtggccaaagagtgtcccgcgccagcggccgccgcgaccgctgcagcaccgccgggcgctcccgcgctgggctatggctaccacttcggcaacggttactacagctgccgcatgtcgcacggcgtaggcttacagcagaacgctctcaagtcgtccccgcacgcttctctcggaggtttcccggtggagaagtacatggacgtgtcgggcctggcgagcagcagcgtaccgaccaacgaggtgcccgcaagagccaaggaagtgtccttctaccagggctacacaagtccctatcagcacgtgcctggctacatcgacatggtgtccacttttggatccggggaacctcggcacgaggcatacatctccatggagggctaccagtcctggacgctagccaacgggtggaacagccaggtgtactgtgccaaggatcagccacaggggtcccatttttggaaatcatcctttccaggagatgtggctttaaaccagccggacatgtgcgtctaccgacggggaaggaagaaaagggtgccttacaccaaactgcagctcaaagaactggagaatgagtatgccattaacaagttcattaacaaggacaagcggcggcggatctcagctgccacgaacctttcggagagacaagtaaccatttggtttcagaatcgaagggtgaaggacaagaaaatcgtctccaagctcaaagacactgtctcctgatgtgggccaggttggccacagacagtttaaatgcgttcagttgtctccaaaaaaatacctttgaaaagacttgaaaatgtatttaatttccctcccccttccctgcctagaaaggcaagcattgtgaatccttttcccccctctctatctctctctctctctcttgacctttatctggttctaaaactttttgctgcccaatccgactttgtaattctatttcttacttgcttattattggttttgttcttgtctaggtttgtttttataatttttaaacattgtttctccctccaggccagtatgaggaaaaaaaaacttgaagtatttttttcaataatccccccaaatgaatttcagaagtgcccttgtatttaggggtttatttttttaacaggattttatatgtgtttccagcactgattatgcttataatccattaggccagaatcgttttttttagcctttcataccctgtgattgtgtaattgaatcattagctctcagaagtttccccaaggcaagtggaaacagctcttaggcattaggtgatttaggaccgctgggagagtctgaaacttggaggttgaaggcacgtgatgactttaaaagcagctaccttattaatattgaaattaagacaatcacccttatctttggcagtctcctttgctgttttgtgtggttttaacatgtcttgtagctgtgatttttgaacctgaaaacagcattcctagtggatgcctttatttctccaactctacatgcagctattaaaatacttacacttggcagagtgactggagatagtataaattcatcccgttccttgggtctgtgggaatggagctaaggccatctcctcaatccttggaaagagactcagccaatgtggccatgggtgggaacttctgtccagagctcagtgaagaagttaattgtctgaatgcatgggcctctcagagctttaaaatatctaacacattttttaaatatggagctctaaggaccaagagggaaaaagaaacttctgaaagtgatgaactactttcaaaaatgttgcgtatttatgggactgaaagattatttttgtagatacagtgtgtgtgagcagtgcttcgagcatttaaaaatcacattttactcctagggagatataaataaaaagaactctcttgtctccactgagtcttcatccatttgtgtttttcaagcttgtgctgcctctagaagctgtttttatttattataaaactttgctctcctcgacatctgtagatgaaggaaacaacaccagttctggtctctgaaacctccatgttctgttctccatttctgtccacctccttctaacacaaatagtgatgtttaaaatgaggatatcatctgtgatgtctaaaatcatcattttaaaaccagaccaactcattaaaaatcaataaattttatttctttcaatatt

SEQ ID NO: 20 - DNA, 2184 bp, mus musc
gacagtctatcagaagtaaagtagaaaatagctttataaggtatgtttggccttgaactttctctagtgttagaagcccttttgttccttttcacatgttatcaagtggttaaggcagggcggattctggatgaagttcaggacaatctatcagaagtaaagcggggagagagaataggagcaaagaaaaaatatggttcacaaaataagtatacaggcctttccaagggtcttgaacccgaggaaaagtttaggtcaggtaagaatacctggggagagattagaaggaaggagaaggaaaaagaaaagaaaaaagatcaattagagaagccagttcttagtagttctgaatcagatgaaaaggctattagggcctggaaggcgctctcccgagcaggtgaagccactggacaataatgacagaggcaggctcttgcagcctacaaggtcttattgtccaccctggagttgtagatcaggattgtaaaggggaacttcaggttctctgttcttgtcctcaagttgtcttttctatatcacaaggggacagaatagctcaactaataattttgccaagcctacatggctgttttttcttcctctggtattcctagagctgccagagagattggttctactagaaatgattctgattacttaataatgcctttagattgttgtcaaattttatctactcacgtaggggtaaaccctcgtggcgtcaggccattacaggtctgacaaatggatgtcacgcatatttcctcctttgagagaaatcaatatttacatgtttagaagaaacccacttaaaaatgggattgtggtatatactgatggatcaaaaactggcataggtgcctatgtggctaatggtaaagtggtatccaaacaatataatgaaaattcacctcaagtggtagaatgtttagtggttttagaagttttaaaaacctttttagaaccccttaatattgtgtcagattcctgttatgtggttaatgcagtaaatcttttagaagtggctggagtgattaagccttccagtagagttgccaatatttttcagcagatacaattagttttgttatctagaagatttcctgtttatattactcatgttagagcccattcaggcctacctggccccatggctctgggaaatgatttggcagataaggccactaaagtggtggctgctgccctatcatccccggtagaggctgcaagaaattttcataacaattttcatgtgacggctgaaacattacgcagtcgtttctccttgacaagaaaagaagcccgtgacattgttactcaatgtcaaagctgctgtgagttcttgccagttcctcatgtgggaattaacccacgcggtattcgacctctacaggtctggcaaatggatgttacacatgtttcttcctttggaaaacttcaatatctccatgtgtccattgacacatgttctggcatcatgtttgcttctccgttaaccggagaaaaagcctcacatgtgattcaacattgccttgaggcatggagtgcttgggggaaacccagactccttaagactgataatggaccagcttatacgtctcaaaaattccaacagttctgccgtcagatggacgtgacccacctgactggacttccaatacaaccctcaaggacagggtattgttgagcgtgcgcatcgcaccctcaaaacctatcttataaaacagaagaggggaacttttgaggagactgtaccccgagcaccaagagtgtctgtgtctttggcactctttacactcaattttttaaatattgatgctcatggccatactgcggctgaacgtcattgtacagagccagataggcccaatgagatggttaaatggaaaaatgtccttgataataaatggtatggcccggatcctattttgataagatccaggggagctatctgtgttttcccacagaatgaagacaacccattttggataccagaaagactcacccgaaaaatccagactgaccaagggaatactgatgtccctcgtcttggtgatgtccagggcgtcaataataaaaagagagcagcgttgggggataatgtcgacatttccactcccaatgacggtgatgtataatgctcaagtattctcctgcttttttaccactaactgggaactgggt

SEQ ID NO: 21 - DNA, 869 bp, mus musc
gaagagacagaagtcgccatactttggagagagaagagccaaacagccatctccctgcacagtccttcaagctcacctcctgccttccgtggacaagaggaagcacaaagaatcatccaggtatggaagctgagggttccagccgcaaggtcaccaggctactccgcctgggagtcaaggaagactcggaagaacagcatgatgtgaaagcagaggctttcttccaggctggagaggggagagatgagcaaggtgcacagggccagcctggagtgggagcggtgggaacagaaggcgaaggagaagaattaaatggaggaaaaggccactttggtcctggtgctcctggtcctatgggtgatggggacaaggatagtggcaccagggctggtggtgtggagcaggaacaaaatgagccagttgctgagggcactgagagccaggagaatggaaatcctgggggtaggcagatgcccctccagggctctaggttcgcccagcatcgactgagggaactggagtccattttgcagcgcactaattcctttgatgtcccaagggaggatcttgatagactgatggatgcctgtgtgtccagagtgcagaattggtttaagatcaggagggctgcggccagaagaaacaggaggagggcaacaccagtccctgaacattttagaggaacattcgagtgtcctgcttgtcgtggagtgagatggggagaaagatgcccttttgcgacaccgagattttgatttgatcacatatgccggctatgacagcccttacttttcaagaattcagcaataaagaggtggattcccagtatgtttgttccattacctctatgattattaaaatattgatac

SEQ ID NO: 22 - DNA, 1082 bp, mus musc
gggcagatggggttctctttaaaatagaaggggtttcgtttttctcgctctcttgcttccctctcttgcttcttacactctggcccgataaagatataagcaataaagctttgccgtagaagattctggttgttgtgttcttcctggccggtcgtgagaacgcgtcgaataacaattggtgccgaattccgggacgagaaaatccgggacgagaaaaaactccggactggcgcaggagggatacttcatttcagaaccagaactacggatcacgtttataaaggttcccgtaacacagactgttgagaaggattcaactgccgaattcagaactcatcagctggggaacgacggtgataaaggttcccgtaaagcagactgttaagaaggattcaactgtatgaattcagaacttttcagctggggaacgagagtaccagtgagtatgtttggccttgaattttttctggtgttaggagcccttttgttccttttcacatgttatatagtggttaaggcagggctgaaaattctggatgaaattcagggcagtctatcagaagtaaagcggggagagagagtaggagcaaggagaaacggtaagtatacaggcctttccaagggtcttgaacccgaggaaaagttaaggttaggtaggaatacctggagagagattagaagaaaaagaggaaaaagggaaaagaaaaaagatcgattagcggaggtctctaggagatactcgtcactagatgagctcaggaagccagctcttagtagctctgaagcaagtgaagaatcctcctctgaggaaacagactgggaggaagaagcagcccattaccagccagctaattggtcaagaaaaaagccaaaagcggctggcgaaagtcagcgtactgttcaacctcccggcagtcggtttcaaggtccgccctatgcggagcccccgccctgcgtagtgcgtcagcaatgcgcagagaggcaatgcgcagagaggtgcgcagagaggcagtgcgcagacaggtgcgcagagaggcagtgcgcagagaggcagtgcgcagactcattcattccccgagagg

SEQ ID NO: 23 - DNA, 1551 bp, mus musc
cgctccctgcgcgctgcgctggcctctgggcgcgggagccgcccccggcccccccgcgctctgcccgccgcggggcgcgcgccctctatatagcgcgcccctgcccggtccgcgccaggccgcctgccacggagtgggcaccgcacgtcgcgcagagccccgcagacagacgcccgccgctgccagcgccgccccgacggccgccccgcgacgcagccgctgccaccgggcccccaaggccaccatgaagaaggaggtgtgttcagttgccttcttcaaggccgtgttcgcagagttcctggccaccctcatcttcgtcttctttggcctgggctcggcactcaagtggccctcggcgctgcccaccattctgcagatctccatagcctttggcctggccataggtaccttggcccaagccctgggacctgtgagtggtggccacatcaatccggccattactctggccctcttaataggcaaccagatctctctgctccgagccatcttctacgtggcagcccagctggtgggtgccattgctggagcaggcatcctgtactggttggcgccaggcaatgcccggggtaacctggccgtcaatgcgctcagcaacaacacaacaccaggcaaggccgtggtggtggagttaatcttgactttccagctggccctctgcatcttctcctccacggactcccgccgcaccagcccggtgggctccccagccttatccattggcttgtcggtcacactgggccatcttgtggggatctacttcaccggctgttccatgaacccagcccgatctttcggccctgcggtggtcatgaatcggttcagcccctctcactgggtcttctgggtaggaccgatcgtgggggccgtcctggctgcaatcctctacttctacttgcttttcccctcctcgctgagcctccacgaccgtgtggctgtggtcaaaggcacatatgagccagaggaggactgggaagatcatagagaggagcggaagaagaccatcgagctgacggcacactgaccggcaccgggcaggggccagtccctcagcccctggaccactggagaaaaggaagacgaagagtttggagcacctctccctagcatcctctcagctggagaggcagcattggatccccatgccgcacacggggatgggatgggagcagaagcccatgatgggacacttgggtgtgggccagggacagggcctctttggaattaggcagaacgactgccacagctcagacctcagagattgtgaaggcagtgccaagctcacagcagttcaggaccatcccagaaaggggtgatagccctgtttatctctccaacccagtatctcatgtgccaaagccttcccccaggtagacagaggggacattgcctgagagctcttcaggagagagatagatggttcgtcgagtgccatcttatttatttctggttaagatggggcggaggatgggggggacgctgctggtattcgggttgggcgtttcccaataaaccaccaatcttcatattgtg

SEQ ID NO: 24 - DNA, 1807 bp, mus musc
agaagttctcgctccaggctggcgaattcctgaacaaacctttaagtcccccagttcttagtgacagacagaaatgttctatgcagatggtcttgggatatgacggggacaagaatctaggctctgactgtgtggtggccttggatggatacagcattgccatactggaccaatctctaattctaatgggacagaactgggttctgaagacagttttaccctgtaatggagacactttgaacatgagcctgctcagagctatgagtatctagtggtctgggcccgaaagcttctgcctgttccctggcttctatgtgggtccaaaagatgtgtgtcctccatattcaaggctgcagacctccagattcagatgaccaaagaaccacagaagaagccagcccctagccaggcactgctgtttgggaagaccttcacagaccacatgctgatggtggagtggaataacaaggctggatggggcccaccaaggatccagcccttccagaacctcacgctacacccagcctgctctggtctgcactactctctgcagctctttgagggcttgaaagcatacaaaggtggagaccagcaggtacgcctcttccggccctggctcaacatggacaggatgctacgttctgctaggcgcctctgcctgccagactttgacaagcaggagctgttggagtgtatccgccagctcattgaagtagacaaagactgggttcccgatggcaacggaacgagcctctacgtgcggcccgtgctgatcgggaatgagccctcgctgggtgttggtatggtcacacaagccctcctgtacgtcattctgtgccctgtgggctcctacttccctggagactccatgacacctgtctccctcctggcggacccttcattcgtcagagcctggataggcggagtcggtgactgcaagttgggggggaactatggacccactgtggctgtgcagcgagaagcccagaagagaggctgcgagcaggtcctctggctgtacgggccagaccaccagctcactgaggtgggcaccatgaacatctttgtctactggacccatgaagacggagtactggagctggtaacccccccactgaatggcgtcatcttgcctggagtagttcgacaaagtctgctggatctggccaggacttggggtgagttccgggtggcagaacgcaaggtcactatgaaggaattgaagcgggcgctggaggaaggccgagtgcgagaagtcttcggctcaggcactgcttgtcaggtctgcccggtgcaccaaatcctgtatgaaggcaagcaactccacatacctaccatggagaacggcccagagctcatcctgcgcttccagaaggaactgaaggctattcagtacggagccagtgcccacgattggatgtttcgggtgtgacggtgggggctgtgccctccctggttggatctgcagacgtgccgcatctagtccagcgtcctcgcttcccagagactcaagagaagtgcaatagggaaaggtctgtccagatgctggatctctggcaccccctcgtggacgttacactccaaagccttaagggcgggacccatgcaatttggacgccacctcaaattttgggtctcaggactcagctgctccgcgtcctggtgttcaagggagaaccttggcttcttctctatctccgttctcaggccggatccccggtgctcttcgtgtccttcccccccccccccttttctccgtacttgctgcaattttgaaataaaatgccaaagaacaagaaaaaaaaaa

SEQ ID NO: 25 - DNA, 2013 bp, mus musc
ttgagtggtcctgagtctgcagaggcttcccttgcctactctgtgtccagctctacccccccccccccaagagaaaggcccagggcagtgtggaagcagagccagacagggctcgatattcctttacccccagcaagagccagagggagggagctgccagccaggcacagccgagaacactggagccatgacaaccagtcaccagcctcaggacaggtataaggcagtatggcttatcttctttgtgctgggcctggggacactgctcccctggaatttttttatgaccgcaaccaagtatttcacaaaccgcctggacgtgtcccagaatgtgtcctcggacactgatcaatcatgcgaaagcaccaaggccttggctgaccccacagtggccttgccagcccggagttctctcagtgccatcttcaacaatgtcatgaccctgtgtgccatgctgcccttgctggtcttcacctgcctcaactcgtttctgcatcagcggatctctcaatctgttcggatcttgggcagcctgctggcaatcctgctggtattccttgtcactgccgccctggtgaaggtggagatggatgctctgatcttctttgtcatcaccatgatcaagattgtgctcatcaattcatttggtgccattttacaagccagcctttttggtctggcaggtgtcctgccagccaactacacagcccccatcatgagtggccagggcctggctggcttcttcacctctgtcgccatgatctgtgccattgccagtggttctgagctgtcagaaagcgcctttggctacttcatcacagcctgtgcagttgtcattttggccatcctgtgctacctggctctgcctcggacggaattctatcgccattacctgcagctcaaccttgcggggcctgcagagcaggagaccaagttggatctcataagagaggagccaaaaggaagaagagaggaatctggggtgccaggccccaactctccacccaccaacagaaaccagtctatcaaagccatacttaagagtatctgtgtcccggctctgtctgtctgcttcatcttcacggttaccattgggttgttccctgctgtgactgctgaggtggaatccagcatcgcaggcacaagtccctggaaaagctacttcattcccgtggcctgtttcttgaatttcaatgtctttgactggctaggccggagcctcactgctgtctgcatgtggcctggccaggatagccgctggctgccggttttggtcgcctcgaggattgtgtttattcccctgttgatgctctgcaacgtgaaggctcgccactgcggcgcgcagcggcaccacttcgtctttaagcatgacgcctggttcatcgccttcatggctgcctttgccttctccaatggctacctcgccagcctctgcatgtgcttcgggcccaagaaagtcaaaccagctgaggcggagacagcaggaaacatcatgtccttctttctgtgtctgggcctggctctgggagctgtgttgtccttcttgttaagggcacttgtgtgaccctgtggggacagaagaactacactgcctgcttcctgctcacttccttccctgccagggacgagcaggggtcgagaggggctgttcttctagctgacttctgctttcctctggactgtgcttcgcccagctgtccaggagccagcgatggcctgcgggtggacttgggattcagggtcagaatggcaagggctcaatggcctctgactgacagctccgactgatgcccgcttactccaagcacaagagactccagggccaagagagatctgtccgcctgcctatcacaggatagggcggaggcggatggctgattggtgtcgtgtgacctgatgtccctccccttgcccttcttccttctgtgcctgttccatgtccccagcccttgtcattttactgccttttttatactgacagaaaccaggtgccttcagaggccatctgattaa

SEQ ID NO: 26 - DNA, 5381 bp, mus musc
ttgcacggtggagaaagtgagtcggcctctgtctgaggtcgggggtagggggcgggaccggggccaggccgatccggacccactggacacactgccctcttggagccggactctgcacccgacacgatgcgccggcctggcctcggcggcccctgccccctcttgctgctgctgctgctcccagccgccacatctgctagcggctccagtcccagccccagccccagccccatcgagaaagcggtggtcccgagccaccaggccggtgttgctgcctgtcactgctgcctagaccagacacctaagagtagccgctgcacccgagcttcctgcagggtccggaactgcccacctgccaagtgcacaggtctagaggggtgcctgaccccaacaccttcggtgcccagccccagccgcagtcccgtggagaagagtcaggtatccctcaactggcagccactgactttgcaggaggcccgagctctgctgaggcaaaggcggccccgagggccgtgggcccgggcattgctgaaaagaaggcccccacatcgcgcccctgccggccaggcccgggtcctatgtcccttgatctgtcacaacggtggtgtgtgtgtgaagcctgatcgctgcctttgccccccggacttcgctggcaaattctgccaattgcattcttcgggggcccggcccccggccccagccatgccgggccttacccgctccgtttatacaatgccactagccaaccaccgcgatgatgaacacggagtagcatcgatggtgagcgtgcacgtggagcaccctcaggaggcatcagtggtggtgcaccaagtggaacgtgtgtcgggcccctgggaggaggcgaaccctgaagccctagccagggctgaagcggcggcacgggccgaggcggcggcgccctacacagtgctggcacagagcgcgccacgcgaggacggctactcagacgcctccggcttcggttactgttttagagaactgcgcggaagcgaatgtgcatcgccgctgccagggctccggacgcaggaagtctgctgccgaggagagggcttggcctggggtgttcatgattgtcacccgtgcgcggaacacctgaggaactccaaccaagtgagtggcccaaatggaccttgtccacccggcttcgagagagttaatgggtcctgtgtagatgtggatgagtgcgccaccggtgggcgttgccaacacggggagtgtgccaacactcgtggcggctacacgtgtgtatgtccggacggtttcctcctggactcttcccgcagcagctgcatctcccaacacgtgatctccgaggcaaaggggccctgctaccgagtgctgcatgatggcggatgctcgctgcccattcttcgaaatatcaccaaacagatctgctgctgtagccgtgtgggcaaggcgtggggccgaggctgccagctctgtccaccttatggttcagagggttttcgggagatctgtccagctggccctggctaccactattcagcttctgacctccgatacaacaccagacccctaaaccaggatccacctcgagtgaccttcaatcagccacgtgttccaccagccacccctcggccacctacaggctttctgcctactcgtcgacctgagccccgccctgaccctgggccacagcctgaaccccggcctcggcctgaaccccggcctcggcctgaatcccgacctcggcctgaaccccggcctcggcctgaaccccggcctcagcctgaatcccagcctaggcctgaatcccggcctcggcctgaatcccagccttggcctgaatttcccctgcccagcatccctgcttggaccggtccagagattcctgaatcaggtccctcttccagcatgtgtcagcgaaatccccaggtttgtggtcctggacgctgcgttcctaggccaagcggctacacttgtgcgtgcgacccaggtttccggctcggcccccaggacactcgctgcattgacatagatgaatgtcgccgcgtccctacaccctgtgctcctgggcgttgcgagaatacaccaggcagctttcgctgcgtgtgcggcacgggcttccaagcaggcccgcgggctacagagtgcctggatgtggacgagtgccgccgcgtgccgccgccgtgtgaccgcgggcgctgcgagaacacgccaggcagtttcctatgtgtgtgtcccgccgggtaccaggcagcaccgcacggagccagctgccaggatgtggatgaatgcacccagagcccaggcctctgtggtcgcggggtctgcgaaaacctgcccggctctttccgctgtgtttgcccggctggcttccggggctcggcgtgtgaagaagatgtggatgaatgtgcccagcagcctccgccttgcgggccaggccgctgcgacaacaccgcgggttcgttccactgtgcctgcccagctggcttccgatcccgaggaccaggagccccctgccaagatgtggatgaatgttcccggagcccctcgccttgtgcctatggccgctgtgagaacacggaaggcagcttcaagtgtgtctgcccaacaggcttccaacccaacgctgcgggctccgagtgcgaggatgtggatgagtgtgagaaccgcttggcgtgtccagggcaggagtgtgtgaactcaccgggctccttccagtgccgggcctgccctgttgggcaccacctgcaccgtggcagatgtactgatgtggatgaatgcagttcgggcaccccttgtggtctccatggccagtgcacaaatactaaaggctccttccactgcagctgctcgacaggttaccgggcgccatctggtcaacctgggccttgtgcagacataaatgagtgtctggaaggcgacttctgcttcccccacggagagtgcctcaacactgatggctcctttacctgtacctgtgcccctggctaccggcctggacctcgtggagcatcttgtctggacgtggacgagtgcagcgaagaggatctttgccagagcggcatctgtaccaacactgacggctccttcgagtgcatctgtcctcctggacaccgcgctggccctgaccttgcctcctgccttgacattgacgagtgtcgtgaacggggacctgccctgtgcgggtctcagcgctgtgaaaattctcctggttcctaccgctgtgtgcgggactgcgatccaggttaccaccccggccctgagggcacctgtgatgacattgatgagtgccgagaatacggctctgcgatttgtggtgcccagcgctgtgagaacaccccgggctcctaccgctgcacaccagcctgcgaccctggctatcagcctacaccagggggcgggtgccaagatgtggatgaatgccggaaccggtctttctgcggcgcccatgctatgtgccagaatctgcctgggtccttccagtgcgtctgtgaccaaggctacgaaggggcacgggacggacgtcactgcgtggatgtgaatgagtgtgagacactacagggcgtgtgtggctccgcgctgtgtgaaaatgttgaaggctccttcctgtgtgtctgccccaatagccctgaggaatttgatcccatgactggacgctgtgttcccccacgggctcctgcaggcacgttccctggctcccagccccaagcacctgccagccccagtcttccagccaggccaccagcccctcccccacctcgaagacccagccctcccaggcagggtcccgtgagcagtggacgtcgcgagtgctactttgatacagccgctccagatgcgtgtgacaatatcttggcccgaaacgtgacgtggcaggagtgctgctgtactgtgggagaaggctggggcagcggctgccgcatccaacagtgcccgggcaccgagacagctgaataccagtcattgtgtcctcacggccggggctacctggtgcccagtggagacctgagtgcccggagagatgtggacgaatgccaactcttccaggaccaggtgtgcaagagcggagtgtgtgtgaacacggccccaggctactcttgctattgcagcaacgggttctactatcatgcacacaggctggagtgcgttgataatgacgaatgtgcggacgaggagcctgcttgtgaaggtggccgctgcgtcaacacggtgggctcttaccactgtacctgcgagcccccactggtgctggacggctcccggcgacgctgcgtctccaacgagagccagagcctggatgacaatctaggagtgtgctggcaggaagtgggacctgatctcgtctgcagtcgcccacgactagaccggcaggccacctacaccgagtgctgctgtctctatggtgaagcctggggtatggactgcgctctctgtcctgcccaggactcagatgactttgaggccctttgcaatgtgctgcgtccacctgcctatggcccgccgcgccctggtggctttggaattccctatgaatatggcccagatataggcccaccttatcagagtctcccctatgggccagatctgtatccaccgccagtgctaccctacgacccctacccacccccacctggaccctttgctcgccgggaggccccttatggcgccccgcccttcgacatgccggactttgaggatgatggtggcccctatggcgagtctgagactcctgacccacctagccgaggcactggttggccttatcggtccagagacacccgtggctccttcccagagcctgaggaatcctctgagcgtggaagctatacaggagccttgtctgagccctatgagggcctagaggccgaagagtgtggtatcctggatggctgccctcacggccgctgtgtacgcgttccagaaggcttcacctgcgattgtttcgatggctaccgcctggacatcacccgcatgtcctgtgtcgacgtcaacgagtgtgatgaggcagaggcaacctccccactctgcatcaatgcgcgctgtgtcaacactgacggctccttccgctgtatctgtcgtccaggatttgctcccacgcatcagccacatcactgtgcgcctgctcgaccccgggcctgagcaggggtgccaaatctcccactatacctgagcaccgggagcttccagagcacgcctgcctccctccctctagtctgcatgtgtgcaaggatgtcagacagtctcgacttaggatggacagacacagaggggtgccttctatggtgccagcctgtcatgcccagtccctcccatcagtgccctgggcctgtcctgggtcccctgacacattacttgcccttttatacaattttcaattaaaacacctattttgt

SEQ ID NO: 27 - DNA, 2860 bp, mus musc
gctgccacattctccaacccaaggagaccagacagaaggacgtggtcactctgaacagttcaacccaagagacaaaaatgcagtgggcctccgtcctgctgctggctgggctctgctcactttcccagggccagtatgatgaagactctcactggtggatccaatacctccgaaaccagcagtccacctactacgacccctatgacccttacccctatgagccctctgagccttacccctatggagtggaagaaggcccagcctatgcctatggtgcaccacctccaccagagccccgtgattgtccccaagaatgcgactgtccccccaacttccccacagccatgtactgtgacaaccgcaacctcaagtacctgccttttgtgccctcccgcatgaagtacgtctacttccagaacaaccagatctctgccatccaggaaggtgtctttgacaatgccactgggctcctctgggtcgctctacatggcaaccagattaccagtgacaaggtaggcaggaaagtcttctccaagctgaggcacttggagaggctgtacttggaccacaacaacctgacccggatgcccggcccgctgccccgatccctgagagagctccacctggaccacaaccagatctcacgggtccccaacaatgctttggagggcctggagaacctcacggccttatatctccaccacaatgagatccaggaagtggggagttccatgagaggcctccggtccctgatcctactagacctgagttataaccaccttcggagggtacccgacggtctgccctcagccctggagcagctgtacctagaacacaacaatgtctacaccgtccctgacagctacttccgggggtcacccaagctgctgtacgtccggttgtctcacaacagtctcactaacaacggccttgctaccaacaccttcaactccagcagccttcttgagctagacttgtcttacaatcagctgcagaagatccctcctgtcaacaccaacctggagaatctttacctccagggcaacaggatcaatgagttctccatcagcagcttctgcacggtggtggacgtcatgaacttctccaagctgcaggtgctacgcctggatgggaacgagatcaagcgcagcgcaatgccggtggacgccccactctgcctgcgcctcgccaacctcatcgagatctgaggggcctcgccttgggctcctggctccgggctccgagtaccgtgcaccgtgcaccgggctcggggtacatgccctgccaccccgctgcatgtttggcttttgctggatggtctgggacacgcatgtgacagaagtccacaggatcttattcaatctccttccaacaggcagagttaggtgggatcaggggccaggccagtttctgcagggggatgaatttggtggtaaaagaaatatagctatagagtctagccccaaaatcttcttgcttggacagtagcatataaccagttccaatttgaccttttttgagctgtgctcaacagcatggccagctgcttctgcagttgctctgggctcctgctctttgctcctcaaaacatcacaacacacctcttgcccagtcacctcctcccagccccagctcaccctctctgccctctttcactggggcctcttctaatgtcttaggcagtcaggagacacccacaccctaagggcacactcttatctgaggctaaacggatggctaaaatcacacacttacccccacctcacctgtttaaagtcaccatattgaacaccataatgatgagctgttaacataggggataaccgactctataatggaggatctatcagaggagggaagtgtccagtggtcattatcagtatccatagtaagatggggaagagacacacctcaggatagcagaactgaaggggcagccccctttccagtttcatctgacacaacatgatctgcaccccttcttgggcttttagtatcgaaggggcaagcgtggttttcaaaacatgagaaagagcctctgctcatcctttggtctagtatgaagggttgttacgcaaatggcagaggcagactccacccgccgaggacctacccactaacccagactagggggtgatctcaatagctcgtttgtccataatgctagagcatcaggaaccagccctgtggagatgctcactggggtgcaagaagccctgccaggcccaagtcctgccgacactagacctggcttcctctgcattcacactatgcagtccgccttatgcccagtggtgcctgtgatttgtagtttgtctaagaacagccccatcttctcctttttaaaggtgatattgcctaggtacaaccaacagcttcttctagaccccactgggatagagccaccagggtagcgagtggcaagaagcagttgtaagatgctagcctgaggtgggtccctgccttagacccctgactctgtgtgcacttgggagcaagcttctctggaaaggacagggtggggcggggtgcttagactgtgctacgggttccagaactgcaatccacaaaagccaaaccagcttgtttcaaccggggagtgccacctgcggagcaaggctgccctggccagggttcttgggaagcacctgcatgtatcaccatcctgcctctgaagagccctcagcatgaagcaagcatgaatggcggccaacctaaccaataaagttattttataagtgcatctgcaaggatggaatggttggtggcagccctcggcatcgcctcggggtacctagacacacaggccttgaaccgtgtcagctctttataaagagtagcctatataaaaactcaagtt

SEQ ID NO: 28 - DNA, 2828 bp, mus musc
gggaactattgcttctggacgggcctagtgggtggcaagccgacattaaggtccttgaccttggctggtgtaggggtgcgggagagccagcagcattgagtgaccaggcggatgagcccccaggagagctctgttcaaccttcccagttcctcctgttggtggggatccctgtggccagtgctctccttctggctcagtgtcttcgatggcactgttgtcagtggctgccagggacctgccggaagccggatgatccagaggagccagtgtccccatccactccattaccagagtatgagctcccaaggcagtgcccagcccccacactaccggaggtggctgcgttctaccaggaactccacatgcctacccagggccagactgtcacccgccagatgatgcataagctactggtgttttctgctcgagaggtggatcaccgtggtggatgcctgatcctgcaggacacaggcatctccctgctcatcccgccaggtgctgtgaccgtgggtcgccaggagagggtgtccttggttctggtgtgggacctgacagatgccccgtcactgtctcatagacagggactagtgagtcctgtggtggcctgtggccctcacggggcctctttcctgaagccttgcaccctcacgttcaagcactgcgcccaacagcccagtcaagcatgtgcctacagcagcaatacctccttgctggatgccaaggactggaagcccctgcgtcagccggggactcatatctccagggacgagtgtcgtatcctgctctctcacttcagtctctacacctgcgttctggaggccccccttggccagacagcccgcaagtggctgcagctggccatgttctgctccccactggtgccagggcagacacacctgcagctgcgcgtctacttcctgaacaacactccctgcgccctgcagtgggctatcaccaatgaacagccgcacgggggacgcatgcgcgggccgtgccagctcttcgacttcactggggccagagcagaccagtgcctgaagctcaagtacatctctgagggttgggagaatgtggatgatagcagtagccagctggttccacatctccacatctggcatggaaagtgccccttccgttctttctgcttccggagaaaggcagccaatgggaatgaagagtgctcggcattaaccaatgagatcattgtcaccatgcacaccttccaggatggcttggaaaccaaatacgttgaaatcctcagattccaggcattggaggaagagacctgggcagtgccccctcctgtctcccagccacccctgtgcaacaggctgcccccagagctctttgagcagctgcagatgttgttggagcccaacagtgtcactgggaatgactggcgcagactggcctcccacctgggtctctgtggcatgaaaatccggttcttgtcctgccagcgcagtcccgccgcggccattctggaattgttcgaggaacagaatggcagcttgcaggagctgcactatctcatgacctccatggagcggctggactgcgcctctgccatccagaactacctaaaccggtctccccggggcagccctgacaggttgcatggaggcacctgggagaaccatggcctagagctggatgagaaactctaagcagactccacggctgtgcagggtgcttcaagaggccatgccataccgtgccatgcctttgagctcaggatcaatgccacagtctcaggtggaccgaactggaacccgcagcaaagcccgacagccctgtcatctgccctgcatcaggatagctcttaatcctgccggccaactttgtcctgcgtgcagattccttcttggtcggtagggggcgcgggagtctgggagatggtcacagccaagcagcttctgagatgctgcttaattttcttgtggacctgtgggcagacctcagagactgctcagtccacaaatattcatggagcgccgaatctcagcaccaagctgggatcatgaggaacgtcggcttctttggacttgtcttggagtctgttctgcgaaatgaagatgcactcccagccggctgagagcaacattctagacagtgtctccctgtggttaggagatgtcttgggtgtgtaactttgttgagaagggagggccctgcggtggactggaacaaagagaagtctctatagagggtcttgggagagaactttggcgggggagggggctcacctcattgatgtgaggaatggcctcttctcccttcatctcttcacttgcagctcacactttgtcctcctcctcagccttgtttctctcatcacacaggaagctgtgaagcctcaggatgcgcgccctatgtctctccacctccagctgagagtgttaagtttctggctgccttttcttgcacttgcccagctcagagttggcctctttactgttgctcatgtcttcacattgcttcatctctatctagttatggaatcccatctttgtgtttctttttctattaggaaaaaaaaaatcagtcactccctcaggcaagtgtctgagctaatgctatgtatttcaaggctactgaaagagcttcggctattccaggaatgaataagtagagacatttctctcacagatcaagttcctccttaggggcaggattaaaggacccccaccccgctccgatccagtcagcagttctggctactgctactcttgcttaccgatagttttgttcgtttgtccaaaggtatacaatccctttggagataataaaagttcacttgcacatttaatgaaaaaaaaaaaaaaaa

SEQ ID NO: 29 - DNA, 3439 bp, mus musc
ggcagtggggctccaccccctgtgaggatataagctggccccggggctgctgttctttcctcttggcctgagctattccgagctccctgtccaccggcatcatggccaaggggttctacatttccaagaccctgggcatcttgggcatcctgttgggtgtggcagctgtgtgtaccatcatagctctgtcggtggtctacgctcaggagaagaataggaatgcagagaactctgccacagcccccacgctcccgggcagcacctcagccaccaccgcaaccaccacccctgctgtagatgaaagcaagccttggaaccagtatcgcttgcctaagactcttatacctgactcctaccgggtgatcctgagaccctacctcacccccaacaatcagggcctgtacatcttccaaggcaacagtactgttcgctttacctgcaaccagaccacggatgtcattatcatccacagcaaaaagctcaactacaccctcaaaggaaaccacagggtggtgttgcgaaccctggacggcactccggcacctaacattgacaaaacggaactggtagagcgtactgagtacctggtggtgcacctgcaggggtccctggtagagggccgtcagtacgagatggacagccagttccagggggaactggctgatgacctggctggcttctaccgcagcgagtacatggaaggagacgtcaagaaagtggtggctacaacgcagatgcaggctgctgatgctcggaaatcctttccatgttttgatgagccagccatgaaggccatgttcaacatcacactcatctaccccaacaacctcatagctctgtctaatatgcttcccaaagagtccaagccctatccggaagacccttcctgcaccatgactgagttccactccacccctaagatgtccacatacctgctggcctacatcgtgagcgagttcaaaaatataagctccgtctcagccaatggtgtccagattggaatctgggctcggcccagtgccattgatgagggccagggtgattacgcactgaacgttacaggccccatcctaaatttctttgcccaacattataatacatcctaccctctaccaaagtctgaccagattgccctgcctgacttcaacgctggagccatggagaactggggtctggtgacctaccgtgagagctccctggtctttgactctcagtcctcctccattagcaacaaggagcgggtggtcactgtgattgctcacgagctggcccatcagtggtttggcaacctggtgactgtggcttggtggaatgatctgtggctgaacgagggctttgcctcctacgtggaatatctgggtgctgactatgcagagcctacctggaatctgaaagacctcatggtactgaatgatgtgtaccgtgtgatggccgtggatgcccttgcctcctcccacccactgtccagtcctgctgacgagatcaaaacaccagaccagatcatggagctgtttgacagcatcacctacagcaagggagcctcagtcatcaggatgctgtccagtttcctgacagaggacctgtttaagaagggcctttcatcttatctccacacctaccagtactcgaacaccgtttatctggacctgtgggaacacctgcaaaaggccgtgaaccaacagacagctgtccaacccccggccacggtgcgcactatcatggaccgctggattctacagatgggctttcccgttatcactgtgaacaccaatacaggagaaatctcccagaaacacttcctcctggattccaagtccaacgttacccgcccctccgagtttaattacatctggatcgcgcccattccatttctcaaaagtggacaggaggatcactactggctggatgtcgagaaaaaccagagtgcaaagttccagacatcctccaatgaatggatcttactgaacattaacgtaaccggctactacctggttaactatgatgagaacaactggaagaagcttcagaatcagctgcaaacagacctttctgttatccctgtcatcaaccgagcacagattatccacgactccttcaacctggccagtgctaaaatgatacccatcaccctggcgctggacaacaccctcttcctggtcaaagaggcggagtacatgccctggcaggctgccctgagcagcctcaactacttcacactcatgttcgaccgctcggaggtctacggccccatgaagaggtatctgaagaagcaagttacgcccctcttcttctacttccaaaatagaaccaacaactgggtcaaccgtcctccaacgctgatggagcagtacaatgaaattaacgccatcagcaccgcctgttccagtggtctcaaagagtgtagggacctggtcgttgagctctatagtcagtggatgaaaaaccctaataataacacgatccaccccaaccttcggtctactgtctactgcaatgccattgctttcggtggcgaagaagagtggaactttgcttgggaacagttccggaatgcaactctggtgaacgaagcggacaaactccggtcagccttggcctgtagcaaagatgtgtggattttgaacaggtacctgagttacactctgaacccggactacatccggaagcaggacaccacctccaccatcatcagcattgccagcaacgtggctgggcaccctctggtttgggactttgtccgaagcaactggaagaaactgtttgagaattacggtggaggatctttctcctttgccaatctcatccagggagtgacccggcgcttctcctctgagttcgagctgcagcagctggagcagtttaaagcggataactcagccacaggctttggcaccggcactcgggctctggagcaagccctggagaagacgagagccaacatcgactgggtgaaggagaacaaagatgcggtattcaagtggttcacagagaacagcagttagttcctggttctgagaaccacttgtcccagtatgacacctcttactatctcagcagcctgtgcagggtctctgtcctcagagctccagacaccagcatcctactctcaaggatgaagtctccagcctgtggagccagcctagctcctaactgtcaggctgacggacacctcccaggtcttgcaccctcatgccaactctgccccaggtccaggcctctggggctgatctcagggaagcccagctctgaagctagatttactggacaaagggcagcctggaaagagactccctgaatgctttactatccctgccccctacccccacccctaccccccacgagatccagaaccaaagaatcaacagggcacaagatctatatatatttttaagagaaaatgtaaataaagaatttctaaaatgaaaaaaaaaaaaaaaaa

SEQ ID NO: 30 - DNA, 2235 bp, mus mus
cactcattcactcagggtccccgggaagggcttgtcagtatgggtgggtccaaggtaggacagtcaaaatgttcagcatggtaggaaacaactccgtgcccgatagtcagcgtgtgtcgggggcaggaaggcagacgtgaagcctagacaggtgtggacacgcacatgtgtgttcctggccacgtgtttgtggaatttgaggcaaaatttttgttttggttcctggggtaaagtttccattcaacattttcctctactgtttaattttttttttaattttaaattacaaaactctgactagaaaaagcgcaatacctttgaaaggactggggcaggcagtggacagcagatggatccagtggccaacagctgtgtgaggaacccccagcccccagcccctgtctggggctgccttcgaaacccccactcagaagatagcagcgcctcagggctgtcccattatcccccaaccccgttttccttccaccaaaaatcagacttcccagcgacagcagcataccccgacttctctgcttcctgcctggcagccaccccacacagcctgccccggactgagcgaatcttcaacgagcagcatcctgccttcccacagacccctgactggcacttccctatctcagaagccgggcagaggctcaacctaggcccagctgggagcgccagggagatgggagccggcagccccggcctggtggatggcacagcaggattgggggaggattgcatggtacttgggacgatcgccaatgagacggagaagaaatcatccagaaggaaaaaagagaggtcagacaaccaggagaacggaggagggaagccagaaggcagcagcaaagcccggaaggagaggacagccttcaccaaggagcagctacgggagctggaggcagagtttgcccaccacaactacctgacccggctccggagatatgagattgcagtcaacctggacctttctgagcggcaggtcaaagtctggttccagaaccggaggatgaagtggaaacgtgtgaaggggggtcagcctgtgtccccacaggagcaggaccgagaggatggggactctgcagcttctccaagttcagagtgagatgctccaaagaccaaaaccaagaaagactgaaggaaccccctctccagttcccaccacccggtcccaccctctcacatctctggacccacccagggcagcctgcacacactctaaggtgtgaagttgcccagtatgtgggagccttgaatttcccagaaggcttagctcagcgtccttacatctcagcagccccttccccaggccttcaacttcccactctctcttgaactccaaaggactgggaaactatagaaacagagcctggggccctcttttctgggtctcttggctactacccacacctagcatccccctcttacatcagggtctcctctgggtctggccccatctggcctatgcagaatccattccttggtaccagctggtgacttgtaaaagcaaacctctctccagatgttcacaccgttgagttgaaggttaggaagtggctcctgtgtctaaggacggagaggatagcacaagagctgatggatgaggactgagatacgtggaccttggaagtagaacgttctcaggctgcagcgtcttgtgttctccaaggactctgactgcagataaggacaggaaaacaacccatcttcctccatgggatgcatttggacctatcctgcgtgttccggaaaaagctttgtgggaagacctcccaggttcacacacatgcgcagctcagatctcagacccaacttctgaggatgctcctgtgaggactggtgggaaaacagcctcaggcaacagtctccttggaagagacccctgtgtgcctcagtattagatggtggatctcccagatcctgctgatgttgcagaaggagggtcagcaagtatttgaatttcttgcatggagatctgattgtgagtgtttaaaaataaccccagttcccttccccaccccatcaagacagaagctgtggaaaatgattgtcaaatgagatggcaagttagagcatgtatcagttttcccctacagcatatttcatatgtttttttttcctaagattacatcaagctaattgtgcaaggtcaattcactttgtaagaaaactctcagagaaataaatcaacaaaaaaatgcaaaaaaaaaaaaaaaaaaaaaaaaaaaa

SEQ ID NO: 31 - DNA, 3011 bp, mus musc
atgctgcaggataagggcctgtccgagagcgaggaggccttcagggccccgggcccagctctcggggaggccagcaacactagcaccaccaacgcccccgaacccgcgctggccacgccgggccttagtggagcagcgctcagcagcccaccgggccagggcgccgacgtcgccgccgccgccgctgccgccgcggagcagaccatcgagaacatcaaggtggggctgcatgagaaggagctgtggaagaagttccacgaggcaggcacggagatgatcatcaccaaggccggcaggaggatgttccccagctacaaggtaaaagtcacaggcatgaaccccaagaccaagtacatacttctcatcgacatcgtccccgcagatgaccatcgctacaagttctgtgacaacaaatggatggtcgcagggaaggctgagccggccatgccaggaagactttatgtgcacccggattctcctgccaccggggctcactggatgcggcagttggtctctttccagaagctgaagctgacaaacaaccacctggacccctttggccatatcatcctcaactccatgcataagtaccagccaaggctgcacatcgttaaggccgacgagaacaatgcttttggctccaaaaacacagccttttgcacccacgtgttcccagagacctccttcatctctgtgacctcctaccagaaccacaagatcacccagctgaaaattgagaacaacccttttgccaagggattccggggcagcgatgacagtgacctgcgtgtggcccggttgcagagcaaggagtatcccgtgatctccaaaagcatcatgaggcagaggctcgtttccagccaactctcggctaagccagatgtcagccccctgcacagcgcacaccaggccctgcagcactaccagtatgagaatggggcccacatgcagtttgctgctgcagagccccaggacctgcccctcaacaccttcccaactcagagggactccagcctcttctaccactgcctgaagcgtagagacagtgcccgccacctggacttgccctgcaagcgatcctacctggaaaccccctcttcagtgggggacgatcactatttccgttctccccctccctacgaccagcagatgctgagcccttcttattgcagtgaggtgacccccagagaagcctgtatgtactcgagttcggggcctgagatcgcaggggtgtcagccgtggacgacctgcccccacccccactgagctgtaacatgtggacgtcggtgtcgccatacaccagctacagcgttcagaccatggagactgtgccttaccagcccttccccgcacactttactgccaccacagtgatgcctcggctgcccaccatcgccgcccagagcgcccagccaccaggaaatgcccactttagtgtgtacaatcagctatcccagtctcaggtccgagagcgggggccctctgcttccttccctagagagcgtggcctccctgggatgtgtgagaggaagccaccctcacctcacctgaacactgccaacgagttcctctactcacagagcttctccttgacccgggagtcatccttacagtatcattcagggatggggactgtggagaactggaccgatggatgacgagactacctgtatccttaacagccccagggccatgtcaatccagtgttaatctctgtgggtggccagcactgccaagaaacatggaaaggtatttcagaatgtgtgtgtgtgtgtgtgtgtgtgtgtgtggtgtgtgcgcgtgcttgaacttctacacacatgtggtcagagagcatctgtcttctgacatgcaactaaggccaaaacaagaaaaaaatgcaattatctaagaagtgactttggctacaggagccgagtccaccattagctgacatctcttggcatgccctgggtgggatagaagtagagggctcaggagtcacctggagctttctgaaatgtactttggttttactcaggggccaagtgagatctctggcacagggagggcctttcttttgcctgggtaggggtggggtatccatgcttaccatagactccctggtcttccaccagcacggggagctgccactttggggaacagaagcacccccttcccttagcttctggagattgtgttgatactacctgagccttagagtgttttgagagtggagttggcctggacttggattcttgaagccccagggtctgaagcatgactttcaaaaaggagtcatgcgccatcacctcatgattcgtacagagtccctcccctcccagtgctagcatgtggcctccctctcagcctgggagacaccgtctgcatcccaggatgggcagtcagacgccccttacccggcagtgtcccttggagatctcactggactgatgtcacatatccgctggactggctctgctcccagaaaacctacatacatgcctggagcgaggatgccggctggcagaagatggacagctgagagaaagtacttgagtgttcaagctcagaggagcatatcatcccttcagagtagggaggggagtatccttggtccatcagcatcacacgtcaccagaacgtcagggcggccggtatgaactctggagatcactaaactctttgcatgctgaatagctatttatatattatataaataaataaatatataaataaatatatatctcacaaatgcgggccacatgtcaaattcagctttgctttttttacaaataaacttactgaaaacaaatgctgaaggaagtatttggaaagacatctatttaaatttttattacgtttgatgttaaagataaaacatatatatatattataaatgcacactgcagataaagctttattagaaaacacactagctgacaggcggtatgaaacttcaagtgtttttgatatatagcatggacattttgttttgcatattggaacataaagccatcttacaactgtg

SEQ ID NO: 32 - DNA, 1754 bp, mus musc
cctccctggtgttcagtgcttagcgaggagagcctggctttggggtccattagctggcacctgggcgctcagtcagggagctccccatatattggagcaagtgtgaagctgaagaagtttctggaagctcaagcctttctacttctccagagagcctctgtggttctgttgacctgacctcctcagtccatcgagcaagtctgaatctgtgtgtccgcttagctgcagacagacttcttgaccatgtgtcccccagtcagcgttcgccatggggccaggggcatgtcctgcctctatgaggcatggctgtaccatcttgtccatggggaacagacgaagatctgctttgcttgcttcaaggcagctttcctattgaataaactctacctggagatgggagactggcaagaggaggaagaggaagaggaagaggaagatgctgatctcctggaatacttgtcagagtcagagtcagagtctgagcaggagccagggcctgagcaggatgcatggcggggattggggtccctttatgtgccacagagtgtctctgaagggtctggggtcctgctgccaacccctgtgtggacacagggcatactattctccatttttgtgcccactgagctctttcctcaggaagctgtacccctggatctgggtcctgaggatgctgagtggacccaggcccttccctggagacttgatgggctttttccctgctcgcaccagctcatccctcctctgacttggtgggatatttttgatgtgatgccatctcctgggcaacctgtgttgttggagttgagatgccactggcccttggaccagacagtagcacaatcctggttgcaagaccagaagtttgtcctcctgttggatagcgtccaatctaggtgccacctgctgtcaatgcgtgtccgctgggtcgtaaggactcaggtccagcactggcaggtgttgctggaccctggtgagatgtgggtggcccattttcggaaagaagttgggcagcacggcctgtaccatcagagcctgaatccctggaggctgagcatcctgacagcttcagaattagggatggagttattgcctgccacctgctacctgtggaataaaggcttctgggtaggttccttcttgccctggcacattaacatgccagagacctggagctgggagccaggagagaggctgtttatcacagatgctactatttgtggtactgactaccaccttgctcagtctttccttgattcccaccccaccccccaccccctcctgacccttactccctgatgcacattcctgagacactaaagctcagacattccccagggccctggggactgtgaagagcaagaggttgcctgttctgagcagctcaggggaacagttggtccaggacttgagggggcatcttgaacatcctgtgagcttatgaacctcagagggaagtctggcatgttcgtgtcagtgttcagtgtttggtaggtgaggcctagctgtatgtttagctgtatggagtgttgtgtggtgggtgttatgggggctccggtcacagatctacgtatgtatggactctgaggcactagttgaccttactgtcataggggtcatatgcttactgtcttagggtcaagatacctgattttagggttcactgtttttgttgttttactttgttcgttactcgtgctccttttgagggcttttgttgaataaagttggtgttttaaaaaaaaaaaaaaaaa

SEQ ID NO: 33 - DNA, 1839 bp, mus musc
gtcggaggaagcgaggttttccggggtgccgtaagccgtctcgaaaaactggtcgaaagcctgtggcagaacgccgttcctgcccaccgtgctatagaaattggacgagacggcgggggtggggtggtggtagacgttggccgagctcttggccagcacgtcgccaggcacgccggccgcgctgggcgcctgcagacagtctctgtgcacgagctcctccgcggagtagcagtgggccagattgccgcgggggtgccatttagtggcgggctcaatggcgtactctctgaaggtcacttcgcgcacgggttggacctggggcaggttggaggagtaggagtatgtcattgggcgcgaagacggggtctggggcaaaaaagaagggaggctggagaaatctggacccgagacgtagtaagtacaacttggcaaatacatgttagaggagcagggaccacgctcatcaaaatccatcattgggctaccttgggctctccgcagtagccgagcttaacatgattctccactgcagctgcctctttgaagcggatccgtgaagtagaaatttggagacccacctcaggggaagcaacagatcgtcactcggtgttctcaccgaaagcacgtaatcgccggtgtaactcatgttggctggggggcctccccgcgcgcagaaaggctggggtgcgcccccgggcagctctcctttgctcagctacatggtcctggtccacgagtgctctgagggcggcaagagagcgcaactcctgacgcctccccccactccccgcccccctcccacaggtttgctctgggaagccccccagcctcagaccctggctggaccccatttggggccaggcttcgccggcacggatgtgccggcctcgtggcttgtccgatttgcacggtgacttgattacacgctctcattcacggtcacttccgaagcgctttagtgccttccgtccccaaaccgccaacaggcaaagcggcttccctccgcggggttcggagtgactcctcagagccagaggcacttctgctcaccggtccgcaagctgcctggtctgctgaagctgacgaatcgggaaaccatgcaattgaggcgaaccttgggctgttttagaggcgctgaggagccttctcctgggaggcccaaggttgatttcagcccaccaggatctggggaagacccaactagggataagagcacaccaaaaggccaagtccgagttccatttctagaagaggcggcttccggcaaggctatgacattggccctggacattggtttcccaggagctgctttttctcaagaactccacagcacggggctgtctccagaaaacgctcttcaacgtttatttcttttaatcgtcgcccggagccctaaggcggctaatgcaagaggccaaaaatgtttggaggaagaaaaacaaaggcaggaagtggccgcggcctgacggtgcgtgtgtgtctgtaaagaagggagggagccggttcaacctcccctcgttttcccgaacttcaaggtctaggcagacccccttagggccttgccgaggctcgcccccacacccccagcggcgcagcatttggaggtggccaacgatttaagcctcggtcgggctgaaaggagatttgatcggcagaacaaaccaacccttttcggaggtttcttttgatttggtcctaaagggtatatgctagtgtccacagcggctggggtggctgctgttttcctcccgccgggctaaaagtaccaagaagggagggagggagagagattcaggcaccttgcgctggctgcactctccttctgagatagaataccag

SEQ ID NO: 34 - DNA, 4241 bp, mus musc
gcccactggtgagtcaccggagagcgaacaaccgggcaccgggagcggggcaccagtgtccccggggcgccgggagtcgattttaggtgatgggaagatcagaaagtcagatggatataactgatatcaatgctccaaagccaaagaagaaacagcgatggactcccctggagatcagcctctctgtgcttgtcttgctcctgactatcatagcggtgacaatgatcgctctctatgcaacctatgatgatggcatttgcaaatcatcagactgcataaaatcagctgctcgactgattcagaatatggatgcctctgttgagccatgtacagacttcttcaagtatgcttgtggaggctggttgaaacgcaacgtcattcccgagaccagttcccgatacagtaattttgacattttaagagatgagctagaagtcattttgaaagatgtccttcaagaacccaaaactgaagacatagtagcagtgcagaaagcaaaaaccttgtacagatcgtgtataaatgagtctgctattgatagcagaggcggacaacctctactcaaactgttaccagatatatatgggtggccagtagcatcagataactgggatcaaacatatggcacttcttggacagctgagaaatccattgcacaactgaattctaaatatgggaaaaaggtcctcattaatttttttgttggcactgatgataagaattctacccagcatataattcattttgaccagcctcgacttggcctcccttccagagactactatgagtgcactggaatatataaagaggcttgcacagcatatgtggattttatgatttctgtggccagactgattcgtcaggaacaaagtttgcctattgatgaaaaccagctctctttggaaatgaataaagttatggaattggaaaaagaaattgccaatgctacaactaaaccagaagaccgaaatgacccaatgctgctttataacaaaatgacattggccaagctgcagaacaacttttccctggaggtcaatgggaagtcattcagctggtcaaatttcacaaatgaaatcatgtcaactgtgaatattaatattcaaaatgaggaagaagttgttgtctatgctccagaatatttaaccaaacttaagcctattcttaccaaatattctcccagagatcttcaaaatttaatgtcctggaggttcataatggatcttgtaagcagcctcagccgaaactacaaggagtccagaaatgctttccgcaaggccctttatgggactacatcagaaactgcaacatggagacggtgtgctaactacgtcaatgggaatatggagaatgctgtggggaggctttatgtggaagcggcttttgctggagagagcaagcacgtggttgaagacttgattgcacaaatccgggaagtttttattcagactttggatgaccttacttggatggatgctgagacaaaaaagaaagctgaagaaaaggccttggcaattaaagaaaggattggctatcctgatgacatcatttccaatgagaacaaactgaataatgagtatcttgagttgaactacagggaagatgaatactttgagaacataattcaaaatttgaaattcagccaaagcaagcagctaaagaagctccgagaaaaagtggacaaagatgagtggataagtggagcagctgtagtcaatgcattttattcctcaggccgaaatcagatagtcttccccgctggcattttgcagcccccattcttcagtgctcagcaatccaactcattgaactatgggggcatcggcatggtcattggacatgaaatcacacatggatttgatgacaatggaagaaatttcaataaagatggagacctcgttgactggtggacgcagcagtcggcaaataattttaaagaccaatcccagtgtatggtataccagtatggaaacttttcctgggacctagcaggtggacagcatctcaatggaattaatacactaggagaaaacattgctgataatggaggtattggccaagcatacagagcctatcagaattatgttaaaaagaatggtgaagaaaaattactccctggacttgacctcaatcacaaacaactatttttcctgaactttgcccaggtgtggtgtgggacctaccggccagagtatgcagtcaattctattaaaacagatgtacacagtcctggaaatttcaggatcattgggactttgcagaactctgccgagtttgcagatgcctttcattgccgcaagaattcatacatgaatccagaaaggaaatgtcgggtttggtgatcttcacaagatactgaacatccacggcaagatttgccaaagccacggaaacaggaactcttccctcagagaaactgggccccggaagtttcttcagcttcctggggggcaattcacagagacgagcatgagctaacataaatgaaattagattattaaatctgctgtgaatgaaaggggagggagcctacgatctagcaaatcaatcacttcactgtgtaaataatgattactttccaacggtagtactaccgttcacttctgtttctcacacagactgcagctttcatgttgtctgtagagaacagtgttaacacttaaagcagactatgacttctgatcaaaaggaggacgatgctcagtacagcagggcaccaaagcacagatttgcccctcagcactcacttttgtttgcaacattcatgctccttccaaactctcccaaagaactcccatacagactgtggccttcaggctcgtgcagttttgaactcattttaccatacataagttattcattcatcccacatcaatttagtttgaacactcttagagcttaaactagagtatctgaaacggttcccctatttcacccactttagtgatgttgagattcttgaacccccctgcagatctttgagcaatttcttgctcttgctgcccctcagactcagtcttttaaaggatttgtagtaatgtataaagaataattctatatttaattattaactacatttatgactgaataaaccattgctataggtaatcattgaatattgaagttatatggccaagatagttttgaagatctgtaacatgatatacagacgaaaatttgagactctttaaatctgtaaatcatattgatgaaaagctttaagtacaaactctgggggtgagcattaccattggacgggtgtcttgagatacataatagttgtggtttacaaacagcattttcaagattaagtctgtccctagtggctaagaaagggtctaactgtatctgtgttgctccatgaatgcttagccttcaggtttgtcatcagatgaaaatattttgataataaattgacgttgtgagccccttactaggcctgtgtgcacgccatgccacctagctttagaaagcctatgtctgaatcgagatgggcagcctccactgtacctgcttcttgaattctacagctcatggactctaattggatttcctgaggcactcatatgccttccttgtccttctgcttactttagtgattttcactattcagtataaattttacaaagattcatttctacagtccttatttttatcaaaaggtgaaaatgaaaacatttctatccaaactcttagttttcatgccttgtgagaaaagcccacttgcttgtaaaagtgttacagtacaatatgtaaaattgtatagaacaaaaactacagttcagcgaactgatattctctgaacacagcaccctagctaaaatctataagaaatggaacactgtagctttctgccatcatcatataactgctaggcatacattatccagatctccagcattatgcactagctctgccccattttgtctttcagtcatgcattacttcctatcttacttctctctgccttacatttgtaaaatttagctgtatgattggtttatatgtgaatctatcattgttgaataaggttctgttgtgtgactatactacaaatattccatcttattattgatggacttttaaggactccatgaactcctgtctattctggttttggattgttacaaatgatataactatgcattatgaactgtgcttatatattcacctttacttgaattatcattggaatcactttcccaaacctatccaaaactatcataaattttaaagacacg

SEQ ID NO: 35 - DNA, 1366 bp, mus musc
tctgaacaactggtttcctctaggagtctgggaggagcgctgtgaagccagcaaggagcaaccagaagctaggagtcagtcagcaaggacaggggctgcctggtaggggtaggagtgggagcagggccagcaggaaggtctgaggaagccattcaaagcttgcagctgggagtgctggggagccgggagggcctacagactacaagagaggttcctggagtctgagcctccggggtcaccaccatgaggccacttcttgcccttctgcttctgggtctggtgtcaggctctcctcctctggacgacaacaagatccccagcctgtgtcccgggcagcccggccttccaggcacaccaggtcaccatggcagccaaggcctgcctggccgtgacggccgtgatggccgcgacggtgcacccggagctccgggagagaaaggcgagggcgggagaccgggactacctggcccacgtggggagcccgggccgcgtggagaggcagggcccatgggggctatcgggcctgcgggggagtgctcggtacccccacgatcagccttcagtgccaagcgatccgagagccgggtacctccgccagccgacacacccctacctttcgaccgtgtgctgctaaatgagcagggccattacgaccccactactggcaagttcacctgccaagtgcctggcgtctactactttgctgtgcacgccactgtctaccgggccagcttgcagtttgatcttgtcaaaaacgggcagtccatcgcctctttcttccagtattttggggggtggcccaagccagcctcgctctcagggggtgcgatggtaaggctagaacctgaggaccaggtgtgggtgcaggtgggcgtgggtgattacattggcatctatgccagcatcaagacagacagtaccttctctggatttctcgtctattctgactggcacagctccccagtcttcgcttaaaacacagtgaacccggagctggcacttgctcctcagtggagggtgtgacactaacccgcgcagcgcataccaggagggctggccccctggaatattgtgaatgacttaggaagagagggagccacttccagtcccactgctggcaatgaatggagacaggctgtctgaggtcaagacagcgtggagcagtggctgggtttctgcccaggactttagaatgcagtaggctggcagctgtgggtcctggcccaggactccaaggtgggatgctccattcctagtcctgtgtcccctctaggtccctgactccatctctgctgctcccagggcaggcctttttctcagaggtcacttaataaacctaaaatcctcccaaaaaaaaaaaaaaaaa

SEQ ID NO: 36 - DNA, 1053 bp, mus musc
gggacaggagctgccctgagtcccgccccccacctgccccttcctcggacccggcaagagatgggtgcccccatcagcacattgttctttggccacctgacatcatgcctcccaagaaggatgctcccgtgaagaaaccagcagggccctccatctctaagcctgctgccaagtctacaccagggacccctctagccaaggccaaggctgagccggctgccccccaggcacctgcaaaatcccaggagccccctgttgatctctccaaagtggtgatcgagtttaacaaggaccagctggaggaattcagagaggcctttgagctgtttgaccgagtaggtgatggcaagatcctgtacagccagtgtggggacctgatgagggccctgggccagaaccctaccaacgccgaggtgctcaaggtcctggggaaccccaaaaacgaggagctgaagtcccgacgtgtagactttgagacgttcctgcccatgctgcaggcagtggccaagaaccgggaccaaggcacatatgaggactacctagaggggcttcgtgtgtttgacaaagagggcaacggcaaggtcatgggtgcagagctcagacatgttcttaccactctcggagagaagatgactgaggaagaggtagagactgttctggcaggccacgaggacagcaacggctgcatcaactatgaggccttcctgaagcatatcctaagcctctgagctccgcaggtggccctccagccagcccctggtatccgcttgagaggcaagggtcctcgatccaccagatagaagcgcaggcagtgcgtctccgcgcccgtccgtagcgcagccgccagggctggactatttccttccccaccccccaccccctcccacccccaccccaccccagccccgactcccaccccacgtagaacctgcagcgacggaaacttgccccacctcctgtgcggccagaagcgcgttcctgccactagggggcacttacagttttgaaataaaaacatggttcctgaaaaaaaaaaaaaaaaaaaaaaaaaaa

SEQ ID NO: 37 - DNA, 3907 bp, mus musc
cggcgggttcaccgtggtaaccgctgcgccgccgccgccgccaccgccaccgccaccgccgccccgccttgcaggccttgggactgtcaccgctctgctttgagggtactttggccgggtctccggaagtagccctcccagattctcagacactcccattctccccacgccgctgccgccgccgccgccgccatgcaaggcgaggacgccagatacctcaaaaggaaagttaaaggggggaatattgatgtacatccatcagaaaaagctctcattgttcagtatgaagtggaagctaccattcttggagaaatgggagatcccatgttgggagaacgaaaggaatgccaaaaaatcatccgtctgaagagtctcaatgctaacacagacatcacctctctggcccggaaggtggttgaggaatgtaagctcatccatccctcaaagctaagcgaggtggagcagcttttgtactatctacagaaccgccgagactcattgccgggaaaagaaaaaaaagaaaaatcaagcaagcctaaagacccacctccttttgaagggatggagattgacgaagtggccaacattaatgacatggacgaatacattgagctcttgtatgaagacattccagataaggttcggggttctgccttgatcctacagcttgctcgaaatcctgataacctggaagagctattattaaatgaaactgccctgggtgcgctagcaagagtcctgagagaagactggaaacaaagtgttgagttagctacaaacatcatttatatcttcttttgcttttctagcttttctcattttcatggactcatcactcactacaaaattggagcactgtgtatgaatatcattgatcatgagttaaaaagacacgagctttggcaagaagaactctctaagaagaagaaagctgttgatgaagaccttgaaaatcaaacattgagaaaggattatgacaaaacctttaaaaaataccaaggacttgtggtaaaacaagagcagctactgagagttgctctctacttgcttttgaatcttgcggaggacacacgtacagaactgaagatgaggaacaagaatatcgttcacatgttggtgaaggctcttgatcgggacaattttgagctgctgattctggtcgtgtcattcttaaagaaactgagtatttttatggagaataaaaatgacatggtagagatggatattgttgaaaaactggtaaaaatgataccctgtgagcatgaagatctcctgaatatcaccctccggctcctcttaaacctctcgtttgacacaggcctgaggaacaagatggtacaagttgggcttctcccaaagctcactgcactcctgggcaatgaaaactacaaacaaatagcaatgtgtgtgctttaccatataagcatggatgaccgctttaagtcaatgtttgcatatactgactgcataccacagttaatgaagatgctctttgaatgttcagatgaacgaattgacttggagctgatttctttctgcattaatcttgctgctaacaagagaaatgtccagctcatctgtgaaggaaatgggctgaaaatgctcatgaaaagagctctgaagctcaaggacccactgctgatgaagatgatcagaaacatctcccagcatgatgggcccactaagaatttgttcattgattatgttggggaccttgcagcccagatttccagtgatgaagaggaggagtttgtaatcgagtgtttgggaacgctggcaaatctgacaatcccagatctagactgggaactggtcctgaaggagtacaagctggttccattcctcaaagacaaactaaagccaggtgccgcagaggatgaccttgttttagaagtggttatcatgattgggacggtgtctatggatgactcttgtgctgccctactggccaaatctgggataatcccagccctcatcgagctgctgaacgctcaacaagaagatgatgaatttgtgtgtcaaataatctatgtcttctaccagatggtgttccatcaggccacaagagatgtcataatcaaggaaacacaagctccagcatatctcattgacctgatgcatgataaaaataatgaaatccggaaagtctgtgataacacattagatatcatcgcagagtatgatgaagagtgggccaagaaaattcagagtgagaagtttcgctggcataactctcagtggctggagatggtggagagccgtcagctggatgagagcgagcagtacttgtatggtgatgatcgcattgagccgtacatccatgaaggggacattcttgaaaggcctgaccttttctacaactcagacggactaattacctctgaaggagccataagtccagacttcttcaatgattttcacctccagaatggagatgtggtggggcaacacgcatttcctggcagcactgtccatccaaggatttcaaagtgctttgcaagtgtgcactaagtaagcctcaagcagccgagcctcgggatggatggcttcgggcagccactggggatccttggacgtcctgccaccgcgtatggattccgccctgacgaaccttactactacagctttgggtctcgataaaatcacccctcccatgtggacactcagcttaggagagatctgtgtgctgtgggttaaccttgaatcttgacttaataatgcatgttatactcctatggggctgtgttgcttatttctccacgttgttagcttcaggttaactctaaccctcatgtcttttgttaaatacggttgatgctccactgttcactcgtccagccacatctcgaggtgaataacatttcccgtgagtctgttgcaaaactgctagactggaaaagcagatactacattatgtactttaagtgactaatttctattggaaaaaaaaagtggcatacatgcaaaggaatgagccgaagtcatgtgttcatacttactgtggttcataggaaacactcatgtacatgggagaaacatacttttttttttaactttctctttctacttataaacttcttagtgtttcatgtgagccatgctatctttaaactttaagtgaacctcaagctttttatcccatgctgtgtctggaagtttctttcacaaagttagtaactgtacaagctttttaactagcagtgagcatatgctgtaagtaatgttatgcattagcatagtctactgagcgacccacgctcatgccatgttaactgcagcagaacaccgggcagcggaaccctctgtagatggagcacgagcatcactgagcttctaagtccgggtcttccaaaatgtgcaatatcaaatgtgaggatgctgattatttttgccttacctaagaaaattaaggaaaggactctctgtttgttcacttaagatagaagtgggtagtgggaaattgaaagggataggatgattaataatgagttttggaaataattcattgattgtaagatattgaaaactttacttgagaaaccaagcaaatgaattcagtatgggcaaagattgttgcttgatcatctcctactgaaggaaacctaagcttccgaacactgcagatcaaagggaagacttctgctcttaactttaggagcccactgatctaagtgtactagttacctcagttcacacgtttagcacaaagtactggagctcgggaggtcctttggacaatacagtccatctgctggagaaatgtaaatctagccaacaggtatgttcttacctgatacataaatgacctgagacattgtttatgtttgtgaattcacaatctgaaagcatgcagttattgtctttgtttcccttttacccataaaatattaaagccagaaaggtttga

SEQ ID NO: 38 - DNA, 2678 bp, mus musc
gagaatgtccagcccggcataaaggtcccggtgcccatgagcttctgtcagtcaggaggccacgctgtgcacaatgggttcctctcgggcaccccggatggggagtgtgggagggcacgggctgatggcattgctgatggccggtcttattctgccaggaatcttggctaagagcattgggaccctctcagacccctgtaaggaccccacgaggatcacctccccgaatgacccttgtctcattggaaagactggctccaacagcatcagcagccaaggtggatccagcagcttcagcagccaaggtggatccagcagtttcagcagccatggtggatccagcagctcccagggaagttcttcaggatccttgatatataaaccaggaacagggtattcccagagtagctactcttatggctctggcggctcccggccaggaggcagtggctctcagtcaggaagcagcggctctcagtcaggaagcagcggctctcagtcaggaagcagcggctctcagtcaggaagcagcggctcccagtcaggaagcagtggctcccagtcaggaagcagtggctctcagtcaggaagcagtggctcccagtcaggaagcagcggctctcagtcaggaagatgggtaagcagcagttctcaatgggtaagcagcagttctcagtccggaagttcaggaagcagtcgcgacagacccggaagtggctctgctctaccaaccggtgacaagacatcaggcatgtctcagtctggaggctcgtccacttcccagagcagcagctccaacctgcggccctgtagctccaacgtgcccgactctccctgcagcggggggcctgtcatcacacactcggggccctacatctctggcacccacactgtatccggtggccagagacctgtagtggtggtggtggagcaacatggctctggtggccctgggtttcaaggcatgccctgtagcaatggaggccccgcaggtaagccctgccctcccatcacctctgtccagaaaccctatggcggctatgaggtggtgggtggctctgccaacagttatctggtcccaggcatgacctacagtgggggtaaaatctaccccgtgggctacttcaccaaggacaaccctatcaggggctcgccaggggccccctcctttgcagctgggcccccagtctctgagggcaagtacttctctagcaaccccatcatccccagccgtggctcttccagttccagtggctacccagtgggcgttgcgttccagcccgtgggctctggcggggttcagccctgtggcactggctctgtcagctctaagggcccttgctcgggtacgagaattcagatcacctccagcagctccagtacctcctaccacccctgcagcggtggtccttcccagggtccttgctcctcaccaggcaccggctccatcagtgggggaagctcctccctctcctctggcaaaatcgtccttcagccctgcggcagcaaatctacctcttcgggttacccctgcctttctgttccctcctccccgttgaatggtggtctgaatggctctcctcagcctgtcccctccgtgggtgtcaagctctgtggcctcaacagccctggaagagtgccctgccgttccatccgcaacattctgacccaagtgaagcctttgggaccccagttaatggatcccaaagtttctctgccacagggagagccacagggagagccacttgagaagtcttaagtcacgcatgccagctattttccaattgccagtcacctcccaactggaagacgtccaggggcccagtttcctgccctccccccgggagagctgcctcacatgctgcggttagccggatgatgctcttgactttattcaacactccaaatggtggactccatcctcctcgtcttttcctggtgcttctgcaccatgctgctggggtgttctctctgtccgattacctgccttaaaacacacttttttgactgggaagtcctcgaacgcacacctcaaccttgggtgcctggataagtcaagcatgcttctgcccgtttgccaaataaggcaaagtccaatccatcgcctgagaaccaaactgcatgtctcagcgacccccccccccccaccatccgttcagtcagccctctaaattgttgggttcccaccattcatcatgagtttcaccacaccctaccagacccatttccagcacacctgtgcctctccttccccagctctccatgtcggtttctgcctggttgtgcttcatccacagcacagatgttactctgtgtgtgtgtgtgccccagggcagccacagaatctggcacagactcccagttccctctggatcctagacagggctcaataaactttgtggactttgtgcagactatttgccttcttggggtccaaggtctcttcttagttcctgggtagtagacctcctgtgcttctagagggcctggtagtacacctcccgtgcctctagagggcctggtagtacacctcccgtgcctctagagggtctggtagtacacctcccgtgcctctagagggctcacgtctcccatttccattcataacttggctcagtgtttcctatattacccctcctcccacagagaaggaaaacaataaatattgattgagctga

SEQ ID NO: 39 - DNA, 1636 bp, mus musc
gagatgcctccttaatgagtagggtagaaaggaagagcattccaggcgggaggaatcaaggccaggtctgagcagagagaggcaaggtgggcacagcccccgaaccctgagcaggcaccatggactggaagaagctccaagacctattgagtggcgtgaaccagtactccacggcatttgggcgcatctggctgtcagtagtgttcgtcttccgggtgctggtgtatgtggtggctgccgagcgtgtgtggggtgacgagcaaaaagactttgactgtaacaccaggcaacccggctgtaccaacgtgtgctatgacaacttcttccccatctccaacatccgactctgggccctgcagctcatcttcgtcacgtgtccgtctatgctggtcatcctgcatgtagcctaccgcgaggagcgggaacggaagcatcgccagaagcacggggagcaatgcgccaaactgtacagccacccgggcaagaagcatggcggcctgtggtggacctacttgtttagcctcatcttcaagctcatcatcgaattggtcttcctgtacgttctccacacgctctggcatggcttcaccatgccgcgtctggtacagtgcgccagcatagtaccctgccccaacaccgtggattgctacatcgctcggcccacggagaagaaggtctttacctacttcatggtaggcgcttctgccgtctgcattattctcaccatctgtgagatctgctacctcatcttccacaggatcatgcgaggcataagcaagggcaagtccacaaagagcatcagctccccgaagtcctccagccgggcctccacctgtcgctgtcaccacaagctgctggagagtggcgatccggaagcagacccagccagtgaaaagctgcaggcttcagcgcccagcctgacccccatttgaaccaggtgctagagaaggggtgaagccgggaggtgctgcaggtgaaggggtcctgggggcgccaagtgctcccactttgaattcactaagctagccaattgtgtttgaagcaggtatttgtgggtgctgggctctgtgctggctacctggtttaggtagcataacagacccagcttccgagagacatttagattagcaaatttactacaagcatgcaagggtctactagcgctgggatggtacacagggcttctacctactgcaggggactgcccggctgggcaccctctcagaaaaagcacagtgaaagaaaggagatggggctctccatcagacatagcaacagcaaaaagaactgggggatctcagaggagaggtgctggctttggactggggacagccagccagagggaggctttactactcaaccatgagaaggtttggcacaaccttctggaggccaaagagcaagtgtggctagcaggtctactgctgcttgagacacacccacgggtccctctcaatccccctttgccaacctctaccttctccctcccaccagggtgctgagccctctgcaccctgtagccaggaccttggaggcatgcgtatcctgtcatatccccggcgtatatccttgacatatccaagtccgtttccttaaaagcaataaagttgtgttttatacaaaaaaaaaaaaaaaa

SEQ ID NO: 40 - DNA, 1411 bp, mus musc
gagtggccgccgtggcctatttccgtgagcactgcgaaccgggtccagggagctcagcgccagctttccccatccacgcagccccgtgggcccctgccgcccgtgtccatgcagccccgtcaacccccgatgccagcgctgttgctgagcctctggctgctgccgagcctcgcactggccgctgctgtcactgagcccgcggacctggaatacaccgaagtcccccggcagcccgcggccgtggggctgccacgcgggatcctgcagctggcggcgcgcgctgcgctgcacttcttcaacttccgcgcgggctcgcccagcgcgctacgggtgctggccaccgtgcaggagggccgcgcgtgggtcaaccctcaagaaggctgcgaagtggacttggtatttagcacagagcaatacaaccccgagcaggaaggtgaacgtttgggcaaatgttctgcgagggtgtttttcaagaatgaaaaacccagaccggccgttaatgtaacgtgcgcacggctctttgataaagtgaagagacaagagaaggattatcggctttacaagcagatgaagcaattgaagactcctctgcacagcatcagcatacctgacagtcatggacacattgataattcactgagacccctgtgggacttggccttcctcggcagctcatacgtgatgtgggagaagacaacccaggtcctgcactattacttggtccagctcagcagtgtggagcggctgaaaacggatgatgacagcatcgactttgacttcactgttctgcttcatgaattctccacacaggaaatcattccctgccgtattcacttggtctggtacccaggtaaaccccttaaagtcaattaccactgtcaagagcagcagagcccagaagaagcctctggaactatggaagcatcagctatggcaccgccagagttcggtaatttctaaagagaagaaatgatctgcttctattatattctaaacaccacggtggtgctgaactccacgagcatgcgcactttcctgattgggctccctgattgggctcggcaggctcagcacatctaccacatagcagatggatcaacaattgctttgggaaaaggtttcgtcttttttgttttgagtttgtatttttcattactctggacatattgtggttattttatgttgctgaattgttcttattttgtcaacttttttttttcagtgaaagtaaatattaactgctaatctcaggcaaatatttccttttagcgtgatacccactttcgaataagtgtttatatttctaagtaataaaatgtgtttgtaagctttggtatggatgtaaaatttgagctaacctggaattaaatcaaatcccaatgttgattaaaaccttataaatagcactgtc

SEQ ID NO: 41 - DNA, 1655 bp, mus musc
accatggcggagacgaggaacagctgacatgtgtgatacattagtcctgtctgctctccttggcactctgtggagccccggggagtttcccttttaaagaggtggcccttcaaagctggaggactcaggagcaggctgtcccgtctctctgggtgtcagccacaggactgaagccacattggcacccctgacccgcgtgtgctcgtggcacggaggtgccaaagccgctgtggaagcagatccctggggaccttgaaatggtgatcatctggtggttctggtctctgctggccatctgtgcttcggactcattccgggaccaggcagtggctatcatgagaaccacaccggtcatcgacgggcacaacgacttgccttggcaactgctaaatttgttcaacaaccagctgctgagaccagatgctgacttgaacaagctagcccaaacacacaccaacatccccaagctgaaggctggctttgtcggaggccagttctggtccgcatacatgccttgtgacacccaaaacaaagatgccgtgaagagaatactggaacagatggatgtgatacaccgcatgtgccagctctatcctgagaccttcatgtgtgtcaccaatagttcagacatcctacaggctttccggagggggaaagtggccagtctgatcggcgtggaaggcggccacttaattgacagcagccttggtgtcctgcggacactctaccatctgggcatgcggtatctgaccctcacccacaattgcaacacgccctgggccgacaactggcttgtggacagaggagatgatgaggctgagagccatggactgtcaccctttgggaagcgcctgctgaacgagatgacccgcttgggtgtcatgattgacctgtcccacgtgtctgtggccaccatgaaggacgctttgcagatctccagggcaccagtcatcttcagccactcctctgcctacagcctgtgtccacacaggcggaatgtgcccgatgacgtactgcagctggtgaagaacacaagtagtctggtgatggtgaacttcttcagcaactttgtgtcctgttcagacagcgccaccttgccccaagtggctgaccacctggaccacatcaagaaggtggcaggcgctggggctgtgggccttggaggagattatgatggtgttactatgcttcctgtgggactggaggatgtttctaagtacccagacctgatagctgagcttctcaggaggaactggacagagaccgaggtcagaggtttgctagctgacaacctgattcgggtcttctctgaagtggaactggtaagcagtaacatgcagtctcctgaggaagtccctatcaccctgaaagagctggacggctcctgcaggacatactatggctactctcaagctcacagcatccacttgcagacaggagccctggtggcctctctggcttccctgctcttccgtctccatcttctgtgacatccgacggaccggaacctcctccagtgctctctgagctcagggaagactggacaagcccagagttcctgttgtccgtgcagaaccacaccctttcccgaataagcagcaggcttacctggggacagctcaagacacaggcatgcaataaatgcaatgagcctt

SEQ ID NO: 42 - DNA, 1833 bp, mus musc
gggtcacagacgttggctcactctcgctaatggttgcctgaggtctgggcactgggccaccacgcacactccagccagggttaaacattagtgggaggttatcgggtttggaaagggggtggggaatctcacttgcaacagtctccagcgggcctgctcggagtaccagttcccacaggagcccagaaaatgcccgtggaagagtttgtggctggctggatctctggagctgtgggcctggtcctggggcacccattcgacactgtaaaggtgcggttacagacccaaagcacgtaccagggcattgtggactgcgtagtcaagacttaccgccatgagtcagtcctgggtttcttcaagggaatgagtttccccatcgccagtgtagccctggtcaactccgtcctgttcggagtgtacagcaacacgctcctggcgctaacagccacctcccatcaggagcgacgggcccagccacccagctacacaaacatctttatagcaggttgtactgggggcctcctgcaggcctactgcctggctccttttgacctcatcaaagtccgtctacaaaaccagacagagccaaggatgcagatatcgagttctatgccccggtaccgggggcctgtgcactgtgcagcctccatcttgagagaagaaggaccccagggactgttcagaggatcctgggccctggtgttgagagacactcctacgttaggaatgtactttgtcacctatgaagggctatgtcgccagtacacaccagaaggccagaatcccagttcagccacagttctggtggcagggggctttgcaggcatagcctcctggatcacagccactccttttgatgtgatcaagtcccggatgcagatggatgggctgaagggaagaaagtatggagggatgctggactgcatggcaagcagcttccggcaggagggaataggggtctttttcaagggcatgacactcaacagcgcccgtgcctttccggtcaatgctgccaccttccttagctatgaatacctgctacgcctgtggagatgagcctggccaggcgatactggcaactccacagcagaatcatggctaatagcagcttggaaaaccaagctaaagcacccagttttccggtgcaaaagcacgaggcaccttttatcatcaagagagttaaggagccaatgtgcaagaaaccaatgaacaagaaaccctgtgcagactccaagacacaccccacctcaccagacacttctgtccaggcagcaggggcacgaagtccataaaaatcaccaaggccaccatgccatagccacccctctgaaggagcactcagagaccagccactgtgctggcatcacccagctcttgagttcaaaccactccctgaacaggaggatgacttctgtcttcttcatgtccagaatccttcaggggtttccattaccttcagggaaacccaggtcctaggctcctggctggcctgccccaccaggtggccttctcttggttacttcctggtgtaggccctcaagtcccaggaatgccatgggtggtgtcattgtcctccagtggcccactctcctcaagatccaggcagagctcttcatttaggggtccttccaacctcatctgtgctgattatggggtacccaagcaccccagccctcctgcctacctcagtcatacctctgtgtgcagtgcttcatggttagttttgttttgtttttcctcctttgagtagttagtttgtgccagtcttgtgctcaaggctgtacttctgtcccttgaacagatacatgaaataaagtttcatctgatgcagta

SEQ ID NO: 43 - DNA, 2740 bp, mus musc
tcaagtagagtaggggttcctctgtgaaggagagctagggacagaatttggacttgttcatgtctctggggttgcggtcaggtccctggctaggactggagtattccgaagcagctcccctttcccagaccctcattctgggccggcagacctgtcacccaaagtgcacaccaggcaagcggggagcaggaggctccgggtgggtccccaccagccggggcggggtcccgtggggcaggggcggggctggcggcgggcagggccgccccttccagcgagggcagactgtcttggcctttaagcgcctgctgaagctcggctgagagaggcccgggtcagtccccacaccatgccctgtttgcgctccgggccagagtgcgcctgagcggttcgggcctcggtatccccgcgggtcttgcgccgccgcctctccgcgatgcaggcgcgcgcgctgctccccgccacgctggccattctggccacgctggctgtgttggctctggcccgggagcccccagcggctccgtgtcctgcgcgctgcgacgtgtcgcgctgtccgagccctcgctgccctgggggctatgtgcctgacctctgcaactgctgcctggtgtgcgctgccagcgagggcgagccctgcggccgccccctggactctccgtgcggggacagtctggagtgcgtgcgcggcgtgtgccgctgccgttggacccacactgtgtgtggcacagacgggcatacttatgccgacgtgtgcgcgctgcaggccgccagccgtcgtgcgttgcaggtctccgggactccagtgcgccagctgcagaagggtgcctgtccctctggtctccaccagctgaccagtccgcggtacaagttcaacttcatcgccgatgtggtggagaagattgcgccagctgtggtccacatagagctctttctgagacaccccctgtttggccggaatgtgccgctgtccagtggctcgggcttcatcatgtcagaagccggtttgatcgtcaccaacgcccacgtggtctccagctccagcactgcctccggccggcagcagctgaaggtgcagctgcagaatggggatgcctatgaggccaccatccaggacatcgacaagaagtcggacattgccacgattgtaatccaccccaagaaaaagctccctgtgttgctgctgggtcactcagcagacctgcggcctggcgagttcgtggtggccatcggcagcccctttgccctgcagaacaccgtgacaacgggcattgtcagcactgcccagcgggatggcaaggagctgggtctccgggactcagacatggactatatccagaccgatgccatcatcaattacgggaactcaggaggacccctggtgaacctggatggcgaggtcatcggcatcaacacgctcaaggttgcagctggcatctcctttgccatcccctcagatcgcatcacacgcttcctctctgagttccaaaacaagcatgtgaaagactggaagaagcgcttcattggcatccggatgcggaccatcacgccaagtttggtggaggaactgaaggccgccaacccagactttccagcggtcagcagtggaatatatgttcaagaggtggttcccaattcaccttctcagagaggaggcatccaagatggcgacatcatcgtcaaagtcaatggccgccccctggcggattccagcgagctgcaggaggcagtcctgaacgagtcttcactcctgctggaggtgcggcgaggcaatgatgatctcctcttcagcatcatccctgaggtggtcatgtgaggctactctcatccagtgccatgccaaagcctacagaaggtggggttccggccttcatgaaatcaggacaaacggctgctgtggtcctcagcaggatcaacagtctcctctctgggtccagcgctgagtccaaggctggatctaaccaggggtccggatctcagccttgacccttaatttcagctccagtagaggaagcacagcgtcctttggaccagatgctcctgatgttaccgtctgagttctctaggcctagaagctcttagaaacctccctggaagtctgcccttcccccacccccaccccagctttctgcctctgccctcaggaaggcccacccggctcccatcccacctcttctcccttgtatcccagtgcctcaacctctccctgttacaggcactttcctgacactaccaggcttccatctgcctcagcacaccccacccccatggtaagacaggggctgcttgccctaccacccggtatccctggagggcaggccctgtagctgtcccctggagaagccagggtcctgacctggagcaggttaacatccctcactgctgagctgagccctgtgctggccaggatggacaggaagatgagtttcataatcacgtggtctccaaccctgacagctcattctcccaaggtgactacacggtggccaaagaggagcggacacctgcctgaggtgcaaggactgagccacttcacctctgcatgcagttctgggtgcggcagctgtctgtgaagatggcgccacccagcagccagcaggctcccaagggcatctttgttctccctagtgtttcaagtgtatttgtgagcattgctgtaaagtttctcccactacccacattgcttgtactgtatgtttctctactgtatggcattaaagtttacaagcacatagctgtc

SEQ ID NO: 44 - DNA, 1392 bp, mus musc
acttcctctctggctgacttagctgacagacctagaagtgggaccaggaccctggcactaagacagattcaaggattgtatatccaacaactagacaagacattaccttctgatcagcatcagggaaaccctgtccttttgatggctgcaaacactacatctcctgcagcaccttcttctcctggtggcatgtccctgtctctgttgcccattgttctactgtctgtggccctggctgtggggcttcctggcaatagctttgtagtgtggagcatcctgaaaaggatgcagaaacgcacggtcaccgccctgctggtgctgaacttggccctggccgacttggctgtgttgctcactgctccctttttcctccactttctggctcgaggcacctggagttttagagagatgggttgccgcctgtgccactatgtctgtggaataagcatgtatgccagtgtcctgcttataaccatcatgagtctggaccgatcactggcagtggcccgcccctttatgtcccaaaaggttcgtactaaggcctttgcccgatgggtgctggcaggcatctgggtggtgtcttttctgctggccataccggtccttgtgtaccgtacagtaaaatggaacaacaggactctgatctgcgctccgaactatcccaacaaagagcataaagtcttccatctgctcttcgaagccatcacgggcttcctgctgcccttcctagcggtggtggccagctactctgacatcgggcgcaggctgcaggctcggcgcttccgccgtagtcgccgcaccggccgcctggtggtgctcattatcctggccttcgccgccttctggctgccttaccacctggtgaacctggtggaagccggccgcacagtggccggctgggacaagaacagccctgcggggcagcgtctgaggctggcccgctatgtgctcatcgcgctggccttcctgagcagcagcgtgaacccggtgctgtacgcgtgcgcgggcggcggcctgctgcgttcggcgggcgtgggcttcgtggtcaagctactggagggcactggctcggaggtgtccagcacccgccgcgggggcactctggtccagaccccgaaggacacacctgcctgtcctgagcctggccccaccgacagcttcatgacttcctccaccattcctgagtcttcgaagtgaactgcagtaggctgggttatgacacaactcataactctggcctgacccacttctgtacctggaggagaacatgttggggactgggcttaagcggaagagagggaggggtggggcaagtcagggcagagagacaggatgctctggcctggcttctgcaggcagcttcacgattaaaactaaagtctgaaatcggct

SEQ ID NO: 45 - DNA, 2835 bp, mus musc
aaggcgccgacctgaccagccgtgctctttactgccgccgccgccgccagcatggcctcgacccgccgccccgtcggagctcgcacgctgctcgcctgcgccagcctactcgccgccatgggcctcggtgtccctgagtccgcggagcccgtggggactcatgcacgcccgcagccgcccggggccgagctgcccgccccgccagccaacagcccgccggaacccaccattgcgcatgcacacagtgtggatccccgggatgcttggatgctgttcgtcaagcagagtgacaaggggatcaacagtaagaggaggagcaaagccaggaggctgaagcttggcctgccaggacccccagggccaccaggtcctcagggccccccaggcccctttatcccatctgaggttctgctgaaggagttccagctgttgctgaaaggcgcagtacggcagcgagagagccatctggagcactgcaccagggatctcactacaccagcctcgggtagcccttcccgtgtcccagccgcccaggagcttgatagccaggacccaggggcattgttagctctgctggctgcgaccttggcccagggcccgcgggcaccacgtgtggaggccgcattccactgtcgcttgcgccgggatgtgcaggtggatcggcgtgcgttgcacgagcttgggatctactacctgcccgaagttgagggagccttccaccggggcccaggcttgaatctgaccagcggccagtacaccgcacctgtggctggcttctatgcgcttgctgccactctgcacgtggcactcaccgagcagccaagaaagggaccaacacgaccccgggatcgtctgcgcctgctgatctgcatccagtctctctgccagcacaatgcctccctggagactgtgatggggctggagaacagcagcgagctcttcaccatctcagtaaatggtgtcctctatctacaggcaggacactacacttctgtcttcttggacaatgccagcggctcctccctcacggtacgcagtggctctcacttcagtgctatcctcctgggcctgtgagcagctgctgcaggctcttacccttaccaagcagagtggtgacagtggccctgtgcacaaggaagcccactggacctctgcacacactggccatcgcaatacctcttaccatagccactgtattcctgcagaggtgatggaagcaggctctcccagaaccagcagcaatttgtgaatatcctaagccctgcttggctcttctgggaccatccagcttacatggtagcacttgctctattcccagctacagagctggcatccttgtagctctattcaggctcaaattccttcctgtggcccagcaaactagtcaggccactcactacctgggacaactcagcctgcacagggtaggaaatgactgtaggtccttagtgcttaagagggaagcccagaccttcttggaccatacactgtctacctgggttcctgagttcctatcctgcagtattctctatgtctgcctagagtacagcctcagggacctaggaacgtcaggggccagtaatcctaggcctggcagcagtttctgtgtctggggtaagcacgatgacctgcaggcccctggtgagcaccctaacatactggagctacactcctttgccatccttatcctctacaaaggctaccagccaacttcccaaccctcggaggctcgggctcactgctagggcccacacactaaaccaaagtttgagcacagttatccacacagggcacctgctcacaagtttccctcctgagactccattgtaaagggggtgggtggtctggctgaatggcagcttgggaggaagaagctggctgagggctcttcccatgagaagggctgccaccctgcagcctgctttagtggttttcccatttttaacaaaatgtgggaccagatcctaataggcagtggagagggctggaccttccaagtcctgatggcctgctgatgaaagagctgacagccagcagtccacacccaccagctgctttgggatctcttggcctagcaggagtgctcaagcctgggacagaggggatagctccagttgcttcatctttcagctgacaccaggatgaagctaccacatcagaacgcccttctataatcggacctgtccccaaatcaggcttccaacagagcgacaggtgcctgggggagctgtccgtgagcaggcctggcccgattctcagtatggctggtacccaccctaccaggaagcactgtgctggcctgggtcctgactccctggcactctgataaggacatgaggtggaaacaccccacccttttctggatttcattttgtatccagtgggcacagacatgtcagtgacgttatcttctacccttgagaaagccacataagcacatatcttaccttccaacaactgtgttacacagcaacttaaaagtatttattgtgtcatattgctaggcagaatatatttatgtaatggatcacacaaagccctaacaatgaagggcagacccgagaagcatgacctctttccagctcacttcaccaaagaccatgaggggtaagctctggaaagcaagggagaaatgcctttagtcttgagactcctactgaagtagcaggagaggctcttactaaccaggaaggccacagtgccaagagttacccagacagaagcacttggggacatgggtcacagcctatggggcactgaatgattcctgggctgctatgaaattgctaaattaaactgtttagctttctgatgaaaaaaaaaaaaaaaaaaaaa

SEQ ID NO: 46 - DNA, 1173 bp, mus musc
gagaggatccagtactgagcagcaggccaagaagttacctcgccggccgctgaatccccagggctgcccgccccagttcagtcatggaaaccgccagcacccccgaggccacggggacaggcaagtacattgcctcaacacagagacccgacgggacgtggcgaaagcagcggagggtcaaagaaggatacgtgccccaagaggaggtcccagtctatgaaaacaagtatgtgaagtttttcaagagtaaaccagaacttcccccagggctgagccctgaggccaccacaccggtcaccccatccagacctgaaggtggtgagacaggcctctccaagacagccaaacgaaacctgaagcggaaggagaagaggcggcagcaacaggagaaagaagcagaggccttgagcaggactcttgataaggtgtctctgggagacacagcccagatacctagtgctctccaaggcccccaggccacgcctctagctgcctctgatccatccgactctgctgccaccacagagaaagccaagaagatcaagaacctgaggaagaagcttcggcaggtggaggagctgcagcaacgcatccaggccggggaggtcagccagcccagcagagaacagctggagaagctggctcgacggagggttctggaggaggagctggaggacttggagttgggcctgtgaggcttcaggagtaggggagtggactgcagaacaaaccatggggtgctctggggtccagggagtgtgggccgcagcagtcaggaggggtacccccatactgactcacctccacctcctgtggcccgactccgtcctccagagcctaggctctctttcatcccttccacttcttctcagctcctgtttttggactttccccttccatcccagtgttcacaatctgagtgccgacctgaggtacctctgctgctgatctgggtgtcttgttgaaaaggaaaccgggggggtgggagtctgttagcgatctgaggctgagggtatagcagtacccatgttttggagtcttagttcctgttcacagtgtttatgaattacttccctgaccatcccgatttccccccaccccaccccccacgccccttaattttttttttttttttttttaaagaaaagaataaattgaagtagatgacatgtg

SEQ ID NO: 47 - DNA, 3843 bp, mus musc
gcagtcgggatattcggctgcagccgcgaagccgggggccaagagccagagcaggagcggcggccggatcgcagcccgccgggcccgccgcaaccatgggcaaccgcggcatggaagacctcatcccgctggttaaccggttacaggacgccttctccgccatcggccagaacgcggacctcgacctgccgcagatcgccgtggtaggcggccagagcgccggcaagagctcggtgctggagaatttcgtgggcagggacttcttgccccgaggatctggcatcgtcacccggcgtcccctggtcctgcagctggttaattctaccacagaatatgccgagttcctgcactgcaaggggaagaaattcaccgacttcgaggaggtgcgcctggagatcgaggctgagaccgatcgagtcaccggcaccaacaagggcatttcgccagtgcccatcaacctgcgggtctactcgccccatgtgctgaacctgactctagtggacctgccaggaatgaccaaggtcccagttggggaccaacctcctgatatcgagttccagatccgggacatgcttatgcagttcgtcactaaggagaactgccttatcctggctgtgtcccctgccaactcggatttggccaactctgatgccctcaagatcgctaaggaggtggacccccagggtcagcgcaccattggggtcatcaccaagttggacctgatggacgagggcacagatgcgcgggacgtgctagagaacaagctgctccctttgcgcagaggttacatcggcgtggtgaaccggagccagaaggacatagacggcaagaaggacatcacagccgccttggctgcagagcgcaaattcttcctctctcacccatcctaccgccacttggctgaccgcatgggcacaccctacctgcagaaggtcctcaatcagcaattgaccaaccacatccgggacacactgccgggacttcggaacaagctgcagagccagctgctgtccattgagaaggaggtggacgagtacaagaacttccgaccggatgacccagcgcgcaagaccaaggccctgctgcagatggtccagcagtttgcagtggacttcgagaagcgcatcgagggttctggagaccagattgacacttacgagctgtcaggtggagcccgcattaaccggatcttccatgaacgcttcccctttgagctggttaagatggagtttgatgagaaggaactgcgaagggagatcagctatgctatcaaaaatatccatggcatcagaacggggctctttaccccagacatggcctttgaaaccattgtgaaaaagcaggtgaagaagattcgagagccgtgtctcaagtgtgtggacatggttatctcggagctaatcagcacggttagacagtgcaccaagaagctgcagcaatacccgcgtctgcgggaggagatggagcgaattgtgaccacccacatccgggaacgtgagggccgcaccaaggagcaggtcatgcttctcatcgacattgagctggcttacatgaataccaaccacgaagacttcataggctttgccaatgctcagcagagaagcaaccagatgaacaagaagaagacttcagggaaccaggtcattcgaaaggggtggttgaccatcaacaacatcggcatcatgaagggaggctccaaggagtactggtttgtgctgactgctgagaatctgtcctggtacaaggatgatgaggagaaagagaagaagtacatgctgtctgtggacaatctgaagctgcgtgatgtggagaagggcttcatgtcaagcaagcatatttttgccctcttcaacacagagcagaggaatgtctacaaggattaccggcagctggaactggcctgtgagacacaggaggaggtggacagttggaaggcttccttcctgagggctggcgtgtaccctgagcgtgttggggacaaagagaaagccagtgagaccgaggagaacggctctgacagcttcatgcactcgatggaccctcagctggagcgccaggtggagaccatccggaacctggtagactcgtacatggccattgtcaacaagactgtgcgggacctcatgcccaagaccatcatgcacctcatgatcaacaacaccaaggagtttatcttctctgagctgctggccaacctgtactcttgcggggaccagaacacactgatggaagaatcggccgagcaggctcagcggcgcgacgagatgctgcgcatgtaccacgcactgaaggaggcgctcagtattatcggcgacatcaacacgaccaccgtcagcacgcccatgcccccgcccgtggacgactcctggctgcaggtgcagagcgtaccggccggacgcagatcgcccacgtccagccccacgccgcagcgccgagcccccgccgtgcccccagcccggcccggatcgcggggccctgctcctgggcctccgcctgctggatccgccctggggggggcgccccccgtgccctccaggccgggggcttcccctgacccctttggcccccctccccaggtgccctcgcgccccaaccgcgccccgcctggggtccccagcaggaagggcccagcctcacctacgagacctgcagccccccgaccaacggaggctcccctcttagacttataagtctgtggccgcaggcatcggctgcctgcctcccagcctccccagggtcccctcagaggactcctgactttctgaccacctgaggggcctccagcgctccctccagccatcccctttagcttcaatctcctggttcaagcacttctggcctcatggctgttacatgggactccctgaggcttggggtggccctgagccagtgagatgagagacagtgagcaaaaatgagggaggccctgtggtgcattgcctgggtggtgtgtgagaggccgtgtgtgtggcaagagagggccaccagcctctactcagactacctgctagttacggcccagcaccccatcttccctttcattcatcaactgtgcatctcttccgggaaccctgcccacatccacacctgcctcagcccctgcctctgctggaggtggctgctcttgccttaccagctctccttccttttctctcttccgttctctctcggctttctctccaactgccagccgatcgggtcaggcaagtccgtcccgtcctgagagccccaggccccccttcgacctctaaccagatccctcctactcctcggagacctcccttaccaagcctgcctggacagctgttctgtgacttgacagtggctcccccggccccaaagcgtcctattcatcatctgtgacttagtctgttgtagtggtgagctgacacatccagatgtgatgttggtgaaaacttgtgcccctctgtggtattgctcctgcgacattctataaatatctataaatatacctatatatacatatatatacatatatatggctgacacagcctcgcctgtagtgtcagaatcaaccaccatgctgtccttgtggagtcttgtggtccaacaagggaacgctgtcatcctgacaaccccccctccagtgtaccacctccagtgagcccccctgtcctcctggcctgtgaacagccatccccttggccatcccaaccctgcagcaaggggatgctgcagcagcagcagctgtgcagttctctggtagccaccagtcttgctgtctcttggctgagaataaaacccatttctggatcatggggaaaaaaaaaaaaaaaaaaaaaaaaaaaaaaaaaaaaaaaaaaaaaaaaaaaaaaaaaaaaa

SEQ ID NO: 48 - DNA, 1643 bp, mus musc
atggggggtccccaagggctaccactgagaacgcctcctagagcccgctgcctagaggcaccgccacacgcggcgtcgaggattgccgagcgcagagcaggctggcactgtactcccgatccaacgcccccgctcctgccgggctggaccggggagaggcccacgatcgccgaaccgcccccgccacgggcggataaggagctaagaggcgctgtcctcagagactctcatcactctgacccgtccgtgggtgagaccgaccgggtcaagatgctccggtcgcgcgagcccaaggaggagaaaaggggaaggctgccggccggccccggacgccgtggcctgggctcggcactcaagtggccctcggcgctgcccaccattctgcagatctccatagcctttggcctggccataggtaccttggcccaagccctgggacctgtgagtggtggccacatcaatccggccattactctggccctcttaataggcaaccagatctctctgctccgagccatcttctacgtggcagcccagctggtgggtgccattgctggagcaggcatcctgtactggttggcgccaggcaatgcccggggtaacctggccgtcaatgcgctcagcaacaacacaacaccaggcaaggccgtggtggtggagttaatcttgactttccagctggccctctgcatcttctcctccacggactcccgccgcaccagcccggtgggctccccagccttatccattggcttgtcggtcacactgggccatcttgtggggatctacttcaccggctgttccatgaacccagcccgatctttcggccctgcggtggtcatgaatcggttcagcccctctcactgggtcttctgggtaggaccgatcgtgggggccgtcctggctgcaatcctctacttctacttgcttttcccctcctcgctgagcctccacgaccgtgtggctgtggtcaaaggcacatatgagccagaggaggactgggaagatcatagagaggagcggaagaagaccatcgagctgacggcacactgaccggcaccgggcaggggccagtccctcagcccctggaccactggagaaaaggaagacgaagagtttggagcacctctccctagcatcctctcagctggagaggcagcattggatccccatgccgcacacggggatgggatgggagcagaagcccatgatgggacacttgggtgtgggccagggacagggcctctttggaattaggcagaacgactgccacagctcagacctcagagattgtgaaggcagtgccaagctcacagcagttcaggaccatcccagaaaggggtgatagccctgtttatctctccaacccagtatctcatgtgccaaagccttcccccaggtagacagaggggacattgcctgagagctcttcaggagagagatagatggttcgtcgagtgccatcttatttatttctggttaagatggggcggaggatgggggggacgctgctggtattcgggttgggcgtttcccaataaaccaccaatcttcatattgtgccttcatctccctccaaaagcctcttgggacagtggccagtcacatctcccacttgcgatgtcacaccctcactcatgctc

SEQ ID NO: 49 - DNA, 833 bp, mus musc
cctcggaccgacatggcccaggaacgcccctcctgtgctgtggagcccgagcacgtccagcggctgctgctgtcctctcgtgaggccaagaagtcagcctactgcccctacagccgcttccctgtgggggctgccctgctcaccggggacgggaggatcttctctgggtgcaacatagaaaacgcctgctacccactaggtgtgtgtgccgagcggactgccatccagaaggccatctccgaagggtacaaggatttcagggctattgccatctctagtgacttgcaagaagagttcatctctccctgtggagcctgccgacaagtcatgagagagtttggcaccgactgggccgtgtacatgaccaagccggatggcacattcgtagtcaggacggtccaggagctgctgccggcctcgtttggacctgaagacctgcagaagattcagtgaaggttgaagaatagaatgtctgctgaatgtgcaagccctacctaaggaacggctcttggaagacttcataatgatgctgtctctggctgggccttggggacacttgccacatgggtcccaaatggctgggcaagggtgaccttgattcacacaccacagcctccccttgagtgatggaaggtgccactcacctaggccaaagcccacatcctcttggggactcagagcactcctctccttccactcccaaagacacgggtattccagacccggtctgcctccctaccagccttcttaggctctgtcgtgtgacttttcagattataaatgccacagcacgtgctgtttgagaagaaaaaaaaaaaaaaaaaaaaaaaaaa

SEQ ID NO: 50 - DNA, 2411 bp, mus musc
ccgctgccaccttcggttgcttcccgtccgctcggcggctcccctcccccgcccggctctctgcgcccctcccgggcgccggggcggcggggccgtcgctgtgcggccctccgtgcgtctgtgcgtgcgcacgtgcgcacttctgcttcccgcagctcggcgcgcgccccgcgacaccgaggccgagcgggggcagggggctgaccgtcatgacccctggaagcccggtataagcgggccgagccccttgacaccactactgggcacaatgtcgacctcatcgctgcggcgtcagatgaagaatatcgtccacaactactcagaggctgagatcaaggtccgcgaggccacaagcaatgatccctggggcccatccagctccctcatgtcagagattgctgacctcacctacaatgttgtggccttctccgagatcatgagcatgatctggaagcggctcaatgaccacggcaagaactggaggcacgtctacaaggccatgacgttgatggagtacctcatcaagactggctctgagcgtgtatcacaacagtgcaaagagaacatgtatgctgtgcagacgctgaaggacttccagtatgtggaccgtgatggcaaggaccagggtgtgaatgtgcgggagaaggccaagcagctggtggctttgctgcgtgatgaggatcggctccgggaggagcgcgcccacgcgctcaagaccaaggagaagctggcacagactgccacggcctcctcagcagccgtgggctctggaccacctcccgaggcggagcaggcatggccacagagcagcggggaggaggagttgcagctccagctggccctggctatgagcaaggaggaggccgaccagcccccgtcctgcggccctgaggatgacgtccagctccagctggcccttagtttgagccgagaggagcacgataaggaagagcggatccgtcgtggggatgacctgaggctgcagatggcaatagaggagagcaagagggagactgggggcaaggaggagtcatctctcatggatcttgctgatgtcttcacaaccccagcgcctccacaggcctcagacccttgggggggcccggcatctgtgcctactgctgtccctgtggctgctgccgcttcagacccttgggggggacctgctgtccctccagctgctgatccttggggtggtgcagcccccacaccagcctcaggggatccctggaggcctgcagcccctacagggccctctgttgatccttggggtgggaccccagctcctgcagctggagaggggcccacccctgacccgtggggaagctctgatggtggggctcctgtcagtgggcccccatcttctgacccctgggcacctgccccggctttctcagacccctggggaggctcacctgcaaagcccagcagcaacggcactgcagttgggggctttgacacagagcctgatgagttctcagacttcgaccgactccgcactgccctgccaacctctgggagcagcacgggggagttggagttgctcgcaggagaggtgcctgctcgcagccctggggcattcgacatgagtggggttgggggatctctggctgagtctgtggggagtcccccacctgctgcaaccccaactcccacccccccaacacggaagactccggagtcattcctaggccctaatgcagcccttgtggatctggactcgctggtgagccgaccaggccccacaccaccaggatccaaggcttccaacccattccttccaagcggagctccgcccacaggcccctctgtcaccaatcctttccagccagcaccccctgcaacgctcaccctgaaccagctccgtctcagtcctgtgcccccagttcctggagcgccacccacctacatctctcctcttggtggaggccctggcctgccccccatgatgcccccaggtcccccagcccccaacactaaccccttcctcctataatccagggtaggagggaggcctggttcagctggcttccccaatttctgctccctgggagatcagtattgtgagtgcatgtgaaatgggggggccctcccccacagtgcccttccccctcctggggcccactcacactacaccctcttcccaagtccccaccccacctccccttgagaaaaactggacatggggatggggaggggagccggccagaggaggacccttttctgtggcattagatgggggagggacagctggggttcccccacccattccacctccctctaaactcatgacaacccccaaatcagtgtttgagcctcctcgttcccttggcacccctggtgaatccttggtgatgattttggcaacttcgggaataaatggcaattctcatgaaaaaaaaaaaaaaaaa

SEQ ID NO: 51 - DNA, 3081 bp, mus musc
gcggcggaagcgagccatggctgtctatcacgggatgctgcgcttcgggaggctgtgtatcgcgagcctgggggcgcggggcccccggacgctgctctctcgccctcggccgaactcgaagttgcagagtgtccgcgctctcagttctggaatggtgaactgcaccaaccccttgcccatcggaggcctcagctacattcagggccacaccgactcccatcttgtgaacacaactgtgggcgagtgccttgacgccacggcgcagaggttccccgacagagaggctttggttatcctccatgaaaacatcaggctgaactttgcgcagctcaaggaggaggtggacaaagctgcttctggtcttctgagcattggcctccgcaagggtgaccggctgggcatgtggggacccaactcctatgcctgggtacttattcagctggctactgcccaggcaggcatcatcctggtgtctgtgaacccagcctaccagtcctcagaactggaatatgtcctcagaaaggtaggctgcaaaggtattgtgtttcccaaacaattcaagacccagcagtactacgacatcctgaagcaggtctgtcctgagctggaaaaggctcagccaggggccttgaagagtgagagactcccagacctgactacagtcatctcagtggatgcccctctgccggggaccctgctcctggatgatattgtggcagccggtggcaaggaacagaacctagcccagctgcggtacaaccagcggttcttgtcctgctacgaccccatcaacatccagttcacctcggggacaactggaaaccccaagggggccactctttcccaccacaacatcgtaaacaactccatgctgataggccagcgtctgaagatgcccacaaagactgcagaggagttgcgcttggtcctgcccagtcccctgtaccactgcctgggctccgtggggggcacaatggtgtctatgatgcatggtgccactctcctcctgtcttctccaagcttcaatggcaagaaggcattggaagccatcagcagagagaaaggcaccctcctgtatggcacacccacgatgtttgtggatattctgaatcagccagacttctccagttatgatttcacaagcattcgtggaggtgtgattgctgggtccccagcacccccagaattgattcgagccatcatcaacaagatgaacatgaaggagctggtggttgtttatggaaccacagagaacagtcccgtgaccttcatgaactttcccgaggacaccctggagcagaaggctggtagtgtgggcagaattatgcctcacacggaggcccagattgtgaatgtggagacgggtgagctgaccaacctgaacgtgcctggggagctgtatatccgagggtactgcgtcatgcagggctactggggtgagccacagaagaccttcgagacggtcggacaagacaagtggtatcggacaggagacattgctttgatggatgaacagggcttctgcaagatcgtcggccgatcgaaggatatgatcatccgtggcggtgagaacatctaccctgcagagctggaggacttcttcctcaagcacccacaggtgcaggaagcgcaggtggttggggtgaaggacgagcggatgggggaggaaatctgtgcttgcattcggctgaagagcggagagaccaccacggcggaggagatcaaagctttctgcaaagggaagatttcccactttaagattccccgatacatcgtgtttgttgaaggctatcctctcaccatctcaggaaagatccagaaattcaaactccgagagcagatggaacagcatctaaaactgtgaagcaaaggagggtcctcccagccctcccagagcccctcagtcctcccacaaaaaggagggtcctcatagccctcccagagcccctcagtcctcccacaaaaaggagggtcctccccagagcccctcagtcctcccacacaaaggagagtcctctcagctctcccagagcccctcagtcctcccacacaaaggagagtcctctcagctctcccagagcccctcagccctcccacacaaaggaggttcctcccagctctcccagagcccctcagccctcccacacaaaggagggtcctcacagccctccccagagcccttcagtcctcccacacaaaggagggtcccgagtcctcctcaggccccttgtcgtctttgtgacttggtgtaaagacttccctgtttggccagtgtctggctggtgtgctcactctgtagctcttgtgtgatggagaagggaagagacaggagggcagccagcaccctcagacctaatttcccagcactttgctgtctgtgcattagttacttaatctaagccccactctgtcctcttgaaattccaagccaccctcatttttttctttctttttggttttttgttttgtttttgtttgtttggctttttttgtttgtttgttttgttgttttcccttgagacaggatcgtcctctgtacccctggttgcacagggtagatcaggctggtttcgaacttaaagagatctcattgcccctgcctccggggtgctggatcagtcttttgtgctaccatgcctggtttttgtatgatttattcatttaatcatttttcaaattgtggccacagatcagtccagaaatgagggttctgttttgcttgttttccaaggctgggaaccttaaagcccctcacgaatacataagcacccttccctggcctgcactcccggcccaataattattgttttgttgttgaaataacagttttgagtgctggagagggggctcagtggttaagaggactgactgctctcccagaagatctgagtttgattcctagcacccacatttggcagctcacaactacctttaagtccacctacagacaatggatgatctcttctggcctctgtgccccctgcgtgtctcccctgccccccccccccccgcacatggtatgtgcttacatagacacatgcaaataaatcaaaacaaatccgtgaaaaaaaaaaaaaaaaa

SEQ ID NO: 52 - DNA, 785 bp, mus musc
gagacacctctctgactattcagcacttgatccccacttctctctgcacagcagccatgccgccgtacaccattgtctacttcccaagtccagggcggtgtgaggccatgcgcatgctgctggctgaccagggccagagctggaaggaggaggtggttaccatagatacctggatgcaaggcttgctcaagcccacttgtctgtatgggcagctccccaagtttgaggatggagacctcaccctttaccaatctaatgccatcttgagacaccttggccgctctttggggctttatgggaaaaaccagagggaggccgcccaggtggatatggtgaatgatggggtggaggaccttcgcggcaaatatggcaccatgatctacagaaactatgagaatggtaagaatgactacgtgaaggccctgcctgggcatctgaagccttttgagaccctgctgtcccagaaccagggaggcaaagctttcatcgtgggtgaccagatctcctttgccgattacaacttgctggacctgctgctgatccaccaagtcctggcccctggctgcctggacaacttccccctgctctctgcctatgtggctcgcctcagtgcccggcccaagatcaaggcctttctgtcctccccggaacatgtgaaccgtcccatcaatggcaatggcaaacagtagtggactgaagagacaagagcttcttgtccccgttttcccagcactaataaagtttgtaagacaaaaaaaaaaaaaaaaaaaaaaaaaaaaaaaaaa

SEQ ID NO: 53 - DNA, 770 bp, mus mus
acaccagcctggcttccatcatgaacaacaggtggatcctccacgctgcgttcctgctgtgcttctccaccacagccctctccatcaactataagcagctccagctccaagaaaggacgaacattcggaaatgtcaggagctcctggagcagctgaatggaaagatcaacctcacctacagggcggacttcaagatccctatggagatgacggagaagatgcagaagagttacactgcctttgccatccaagagatgctccagaatgtctttcttgtcttcagaaacaatttctccagcactgggtggaatgagactattgttgtacgtctcctggatgaactccaccagcagacagtgtttctgaagacagtactagaggaaaagcaagaggaaagattgacgtgggagatgtcctcaactgctctccacttgaagagctattactggagggtgcaaaggtaccttaaactcatgaagtacaacagctacgcctggatggtggtccgagcagagatcttcaggaactttctcatcattcgaagacttaccagaaacttccaaaactgaagacctgtcagttgatgcctcagaatgagtggtggttgcaggcaacctttaagcatcagaggcggactctgggactggtagtgaatctactgcatttgaaaggtcaaaggaaaacagagtttttattaatttataatttaaattattttctactttttatttaaactttttaacctcagaaaataaaatatttataataca

SEQ ID NO: 54 - DNA, 1063 bp, mus mus
catcccgagccaaccttccggaagcctccccatcagcaccatgaacccaagtgctgccgtcattttctgcctcatcctgctgggtctgagtgggactcaagggatccctctcgcaaggacggtccgctgcaactgcatccatatcgatgacgggccagtgagaatgagggccatagggaagcttgaaatcatccctgcgagcctatcctgcccacgtgttgagatcattgccacgatgaaaaagaatgatgagcagagatgtctgaatccggaatctaagaccatcaagaatttaatgaaagcgtttagccaaaaaaggtctaaaagggctccttaactggagtgaagccacgcacacaccccggtgctgcgatggatggacagcagagagcctctctccatcactcccctttacccagtggatggctagtcctaattgcccttggtcttctgaaaggtgaccagccgtggtcacatcagctgctactcctcctgcaggatgatggtcaagccatggtcctgagacaaaagtaactgccgaagcaagaattctttaagggctggtctgagtcctcgctcaagtggctgggatggctgtcctagctctgtactgtaagctatgtggaggtgcgacgcccttcaccatgtgccatgcccaggctgctccccacaccctccttgtcctccctagctcaggctcgtcagttctaagtttacctgagctcttttatttcagatgtaagactacaaatttaagtttgtaagcacgaacttaaccaccatcttcccaaggggttatcaagatactcagaggaacctgaaaatgtatgtgtaaatactatttaatgaacgactgtacaaagtagaattcctaatgtattttttgtatgctttgcattgtatatggaagaacttgtgtcatcaagtatgtatcaatgggtagttaaagtttatttttaaaaccgtccaataccttttgtattatgtaacattcaaaagacaatgtactgtattgaaagtagtaagagacccaaaatgtaataaagtaataataactgacatg

SEQ ID NO: 55 - DNA, 2971 bp, mus mus
actgcagtccctccctttaaggacaaggaagagcacccagacaccaacactctgcatcccatctgtttcctgaacatcccagcttagaggattccaaagagagctaccccagtgaccttgctcccagagaagaaggaggtgaaatcacaagaagaccactggcatcactgctcaggaacagccccacagcagcaaataaggactccccttctgctacatccacaccagcatctgttgccattttctctcttgatgcaaacctctctgactcagattccaccatagaccggaagagggatatgctgaaacaaaagatctggaaggaatccataatgccaagagcatgggctaccataccatcccggggactgacccaaaaggacatggagatgttgcaacagactttgaatgactatagatcttcctttggcctggatgaggcatcactggaaaacatcgctgaggatttgaacgtgacactggaggagctcaaggcaaacattaagtctccacatttgctctcagatgagccagatacatccttaacagagaaactattgaagtacattggaaatccttacttttcaaaggttttccacttgcaaaattatttcattgacacggttgcaagcgatgttaaaattatcctcagtaaagaagagcttttcacagagcagcatcctccactgcacacagctacatgccagccttcctctagcagaccctctcctttaatggctcaacttttggtgatcagctttgaaaatttttttaagaatttcaagaaggaaagcaaaatcctctctgaggaaaccatcaccttgattgaatcccatctggaggataagaaccttcagggggcattgtctgaaattagtcatgctctgagcaacattgacaaagccccactgaacattgctgtgactggagaaacagggacagggaaatccagcttcatcaatgccttgaggggagtaaggggtgaagaagaaggtgcagcgcccactggggtggtagagacaaccatgaagagaactccatacccacacccaaagcttcccaatgtgacaatatgggacctacctggcattgggtcaaccaacttccaaccacaaaactatctgacagaaatgaagttcggtgagtatgacttcttcattatcatctcggctacacgcttcaaagaaattgatgcacatctggccaaagccattgcaaagatgaacacaaagttctactttgtccgaaccaagatagatcaagatgtcagtaatgaacagaggagtaaacctaagtctttcaatagagacagtgtcttaaagaaaataagagatgactgctcaggtcatctccagaaggttctctccagtcagcctccagtgttcctagtctctaactttgatgtgtctgactttgacttcccaaagctggagaacaccctactgagggaactcccagcccacaagcgccacctcttcatgatgtccttgcacagtgttactgagactgccattgaccggaagagggatttcctcagacagaggatctggctggaggccctgaaggctggagtatggaccaccattccacttgggggcttagtcagagataaaatgcagaagttggaagagaccttgactctctacaggtcttactttgggctggatgaagcctcactagaaaatattgccaaggatttcaatgtgtctgtgaatgaaattaaggcacaccttaggtctctccagttgttaacaaagaacaatgacatgtccttcaaagaaaaactgttgaaatatattgaatatatttcctgtgttactgggggaccacttgcctcaggcctttactttagaaagacttactactggcaaagtctcttcattgatactgtggcaagtgatgccaagtctctccttaataaggaagagtttttgtcagagaaaccaggatcgtgcctctctgacctccctgaatactgggaaacaggaatggagttgtgaggtactaacctttggacttgcttcagacatggacttaaagcctccttttaagcagcaaacattttctgggaaagaccagacgattcatctctttcagagagagaataccactgtggcaagtagaagagtttcccacggtataagaactatcttccatttaagtatcatgaatgagaatatatggttatatatatatgtgccacgctctccggtcaagtcagcttgacaggctgaggcttgaaagctactcacgaggcaaaagagtttcacagaaactcactcctggagtctggcgttctctctaacccatacattaattttctattcccgagttagtctggtgtatggatctacgagctctcttttaatattttattataaatgcctctcaagattaattctgttatagttagcttcccccagtgttccaagatcccagaagccgccgagcctagaatcctgtgagaaagcagcaaggaagtttaacctattcagtaactaattaagaattacaatagacggagccagtggctcatctggtctgcagaaagagcctggaaatctcactgagatagaaatctttagtacaggctacattgcaaaccaaaagcaagttggtacactctcctgacaaatggagattccccagataagataagaatttagcaaggcctaggaatttaggggtctgtgacattgcattattcttgaggcctgccaagagcagaaccccctggtgctattaacactaaagtgtgaaattcttgcctgtcattaggctgatcctaggcaggactgcttatctttattgtaaacatttacctggttcctgcaattcctttcgaagtcattccttcgttttgtatctggtaaacttcaatgtaccttgcctgatgtgacttccaaccccttgtattctctgtactataaaaagtctgatgctcgacctgacaaattcaatcagattctac

SEQ ID NO: 56 - DNA, 2905 bp, mus mus
aaagacattctcggacttcactccaacacagtgactcaatagaactcagctctgccatgaagtccgctgttcttttcctcttgggcatcatcttcctggagcagtgtggagttcgaggaaccctagtgataaggaatgcacgatgctcctgcatcagcaccagccgaggcacgatccactacaaatccctcaaagacctcaaacagtttgccccaagccccaattgcaacaaaactgaaatcattgctacactgaagaacggagatcaaacctgcctagatccggactcggcaaatgtgaagaagctgatgaaagaatgggaaaagaagatcagccaaaagaaaaagcaaaagagggggaaaaaacatcaaaagaacatgaaaaacagaaaacccaaaacaccccaaagtcgtcgtcgttcaaggaagactacataagagaccattactttaccaacaagcaccctgaatcttaatgggttttagattgtactgaaaagccttccctggcagagcagcctttaatacataggcttttaatacattaactcaactacaaaacataaagtgttaatttgaaattataactaactttaggaagttaattgcaaaactccaatagtaacaattgctagaggcaaaaactctgtgttctacacagccaacaaaatttcatcacgcccttgagcctagtcgtgataacatcagatctgggcaagtgtccctttccttcatagctatccaatgcacaacagctgtctggcttccagagccacacatttggcagcctccgaagacttctgaggctcacgtcaccaaatcccaggcctgtctgtttgctggtgagctagatagacctcaccaagctggagaggccctcggcagctgcatttgggtcagcctagagcccctgcacacattgtgtctcagagatggtgctaatggttttggggttctacagtggagaccaccagagttggccttcagaacctcccacgtagctttcgagaccatgggatttcattattaacttgatcccatcttcagagcttattctaagtttgcctcttcaataaaactctcctagaaggttgtggctgtagcttagtggcagaacacttggtgttgcagggaccaggtccttcactaacagtgcaaaaacttaaccaatttaaagaacattttctggctactcaaattctcttaaatttattcctgtttcacaagtaaacacttcgctgctatctaattggatttgtttgtttgtttgttttactttttccaacgagacgggtttttaagagtagggaccacagactattcccctaaatcttccacagtgcctacaaaaacttggttttgaataatttcctaattgtatgtgtgagaggtagaaaggctgttacacaccaggcattggccaatccccggctgctccaaattgcctaactaacctttggcctccttgcttgcttaccactttttttttttttttttaaagaaagttttatatctggctgtcctaaaactctcaaagtagacaaggctggtctcaaattcatacatatctgtattctactgcctcctgaatgctggggttaaaggtgtgtgctactacacctgattgcctgccttccttcctttctccctccctcccttccttccttccttccttccttccttccttccttccttccttccttccttccttaaattatctagctttcttattatcttcagacatcttcagcgcacagagccagacagggtgaaaaagagccttaccttgtgacaggaggctcgtgtctttaacaaacaggaatcacatgttcaagacatttgcggatatttgggactgctcaggaaaaattacacaggccatctagaaacataagcttacatggaagacaggtttgactgattggcaaatactagatctttcctcactcaaaacaaaattcctctaatatcattcttgatcaggacaagctccctaggagtcaacaaaagagctgccaaatcctttagcaagtttatcttaggtgaatatgaatttccttgccaccttccctccctcattgcagaaatcccagtgtatgattgtatggattgccacatcaggctaggagtggtgaaatggaaagatcagggctggagagggagccagagttccattcccagcacccacccccacgtgtgcgtgagccttgtggccacctgtgactccagctccagggaacccatttctctcttctggcctctgcaagcattgcacaggtgtacacaggcccccatgacatacacccataatctcagacggcaaataaaaatctttacagagatatttttaaaggaattaagagctacaggaagcagtaaattctgcgagtggaagtgtggacagggccaagttagcctgtgtgggagctggaaactgctctagagaggaggtctgatgaattagatagaaaagaatgtctctgggcagaagttccgtcttgagcatgctttttctcaaatactgccattcctggcgctgcatgcaggtggtttttgtgctgctggtgggactcccatccaaacaacattgcacagtcaaaacgttgtccacctcccttcggtaatttactttggaaaaaaaaaaaaaaagtctaaaattgtttcctaactagttagctacccttgcatctgacagctgggtagtatgcataacgactagccaaagcctgtgtaatttttactaaatagttatgttggatgcatatgcctacagtatgacttcatatgtgtactctaatttttaattcaaagcaaattagcatatgtgctctgaagctatttcgtgaaagcgtagtgatatcagtaaaagtgcactaaattccaaaataaacatgtttttcaatgtc

SEQ ID NO: 57 - DNA, 1791 bp, mus mus
atgttcccaggctggctggctctcatcttcttgtctgtgctgagcttggatacccaggccttcaacagaaagcttgtcaagtgctttgaggatccccagtatgaagagctgctgcagctggctcgaaatggactgggacagacagccgagaggaagcaagtggtggtgattggggcaggcatggctgggctcactgctgccaagatcttgcaggatgctggccaccaggtgactgtgctggaggcctcagggcgtgtaggtggcagaattgagactcaccgagttcctggagcacactggtatatagagctgggtgccatgaggatccctatcaatcacaggctttctcatgaactcatcaaaaaatttggcctgatgctaaaggaattctgcccttgcaacaaccagacctgggtgctggtcaatggagttcggcagcgctcaggggcagtgcaggccgaccctggcctgctgggttactccgtaagagctgatgaggtggggaagacagcagaacagctctttgatgcatcgctgagaaagctgaagaacagcagctgccaggaggtcctggagaagtatgactcgttctccaccaaggagtacctgatcaaggtggggaacctgagcagaggggccgtgcagatgatcggcgacatgctgaacacagactccggttactatgaggcctttacagagaccctgcgtggtatcatctcctttttccaagatccccggttcgatgaaatcgttggaggctttgaccaactcccccaggctctgcacaattctctcctcccagggactgtttggttctactcaccagcagaggaagtggaaatgtctggagactgtgttcacgtcacctacaggacacctgaccctctgctgcccagggcgcggctgactgcggattttgtggtggtggctaccactgctaaagctgcccgcctccttcgattccagccaccgctctctctcaacaaacaggatgctctgcgctccgtccactacaatagtgccaccaaagtgatcctggcctgcacacagcgtttctgggaacgagacggcattttcagcggcaaatctagcaccgaccggccttcccgtttcatctactatcccaaccacatcttccccaatggtgcaggggtcatcctggcatcttacaccctggatgatgactctgtgttcttcacagccctggaccacactcaggtggtggatattgttctggatgacctagctgctcttcacagccgcgctaaagaagagctccgtgctctctgtccttactctgcaatcaagaactggagtcaagacccttattccatgggtggctttgccttcttcaccccctaccagtatgtggactatgcccaggaactcagtcagccagaagggctggtcttcttcgcaggggagcacacagatctgcctcatggctggatcgacactgctatcaagtcaggactcagggtggcaaagaacattcaggaatctgtggacttggctttgacaaggaaccccagaaatacaaaagaatacttctccaaaagtgagctataaacaactatacgggccccaggaactaggaggtttctaaacaagtttgtccatcaggagacaatgcaaaacccactctcactcatctttgccttcgctctgagacttgacctgaggcccacgactggagacctaaggtgactgcctgtgaccttggatttatgacaggagctcagcaagaacttgtggcatagagattataaacaataaagttgaattcaacta

SEQ ID NO: 58 - DNA, 414 bp, Mus Mus
gatcatttcttctaagtgtcctatcgagcaaagaagcaactcatcagaatgatgcctggaggcttgtcacgggccagatctgccacaccagaaatccaggagattgctgataaggttaagtcactgcttgaagagaaaaccaatgagaaatatgaagtgttcaaagctgttgagtataaatctcaagtcgtcgctggacaaaattacttcattaagatggatgttggtggtggttgtttcctccacataaaggtcttcaaagggatttctggagaaaatgttttagaacttcatggttaccagactaacaaaaccaggaaagacgagctgtcctacttctaagcagcaaattctaaagtgacctgattcttcttgtaaacaaatttagccttcaataaagaaatattcttgaaa

SEQ ID NO: 59 - DNA, 3218 bp, Mus Mus
acactctctcttcaagcctggagtgtcaagtgcctgaccccagtggcaaggcttccagattcttctgaatcaaacctgttatatccaactggaatcctcctggaaaacatacaaagatgagttcttaagaacgtcagaaggaaagagctgatttcttcatccagtcactggataccaagtaaacatcctgatacctctgaggagagccagacgatggattctgtgaataatctgtgcaggcactatgaggagaaggtgcggccctgtattgacctcatcgacaccctgagggctctgggtgtggagcaggacctggccctgcctgccatcgctgtcattggggaccagagttcagggaagagctctgttctggaagcactgtctggagtggccctccccagaggcagtggtattgtcaccagatgccctctggtgctgaaattgaggaagctgaaagaaggagaggagtggagaggcaaagtctcctatgatgacatcgaagtggagctctctgatccttcagaggtggaagaggccattaacaagggtcagaacttcattgctggggtaggcctggggatcagtgataagctcattagcctggatgtcagctccccaaatgtcccagacctgactctcattgacctgcctggaattaccagggtggctgtaggcaaccagcctgcagacataggacgccagatcaagagacttatcaagacatacatccaaaaacaagagaccatcaacctggtggtagtccccagcaatgtggacattgctaccacagaggctctgagcatggctcaggaggtggaccctgaaggggataggaccataggggtcttgaccaagcctgatctggtggacagaggtgctgaaggcaaggtcttggatgtgatgcggaacctggtgtatcctctgaagaagggctacatgatagtcaagtgcagaggtcagcaggacatccaagagcagctgagcctgactgaggcttttcagaaagagcaagtcttcttcaaggatcactcatacttcagcattcttctggaagatgggaaggccacagtgccctgcctggcagagagactgactgaggagctcacctcccacatctgtaaatcactgccactattggaagatcaaataaatagcagtcatcagagtgcaagcgaggagctgcagaagtacggtgcagacataccagaagatgacagaacgaggatgtcctttctggtgaataaaatcagtgccttcaataggaatatcatgaatttgatacaagcacaggaaaccgtatcagagggagacagccggttgtttaccaaactgcgaaatgagtttcttgcttgggatgatcatattgaggaatattttaaaaaagattctcctgaggtacaaagcaagatgaaagaatttgaaaatcagtatcgtggccgggagctgccagggtttgtggactacaaggcatttgagagcatcatcaaaaagcgagtcaaagccctggaagagtctgctgtgaacatgctgcgcagggtcactaagatggtccaaactgccttcgtaaagattttatcaaatgattttggtgattttttaaacctctgctgtactgctaagtccaaaattaaagaaataagattaaaccaagaaaaggaagctgaaaacctgatccgacttcacttccagatggaacagattgtctactgccaggaccaggtttacaaggaaaccttgaagacgatcagagagaaggaagctgagaaagagaagaccaaggcattaataaaccctgctacctttcaaaataactctcagtttcctcaaaaggggttgactaccactgagatgacccagcacctgaaagcctactaccaggagtgcagacggaatattgggagacagatccctctgattatccagtacttcatcctgaaaacatttggggaggaaatagagaaaatgatgcttcagcttttacaggacaccagtaagtgcagctggttcctggaggagcagagtgacaccagagagaagaagaagttcctgaaaaggcggcttttaaggctggatgaggctcggcagaagcttgccaaattctccgattaaccaggctagctatgtggctttcctggtcgctgtgcaatgatcctttagctgctaaccttatgtcagaatgttgcctttagactgtggaagcaagcaagccctttgtaaactctgaggagatgaggagagaggagctatggagagtcattctacttcagcaggaaggcatgaccctctcaaagcctaggaggatggcacctctcaggatcctgctcctaactgtcttttctttgtcaggaggatgtactggctgagcacctcagaagggtcggcttctggttttgtactgtcctgtctggaagcagtgcgagaggtgccacagggtcctggtaggacagctctttgtaggcatacatttttttttgcaaaaattttaacaaggattccacctctcttttagcccaccacccatcagaggtagtggaagagaaaagttattaggctatggaggaagtggacctgttcagcaatagttctttgggggcgagctcagtcttccttggcagcagttcagtcccataacaaacaccaagtatgactcagcagctgcagaccagtcctctaggcaggcagacaccacatacaaccagcagctatagtccagtcctttccacaggcagaaactaagaatgaatcagcagctgaagttcaatcttgatgaaagcttgccatctagcctgaggtgaggctgcagaagcaacaaactgctgcaggaacctcacaagtagttcttaggtgagtttctctcaatgtcggtgttaccacaagtggagctcaaccatgctatgtaaggcaaaccattccatgcatgttgatagtaaagaatagctagacagagcaaaccaagccaaggctccgttgctcatctccgactgtttgtgaggtcatatttatactccttcatcatgggtcctttcatgtatttgcaatgtcatatgaaagcatcctttcagctgtgtctgcttcagggaaacattctttcatgtgtttgcttcagcaagacatcatttcacctgtgtaccccagcaaaacatcatttgatataactaactttccaaggaaactggaagtttccactttagcgcttccaataaaattcttgctaagtg

SEQ ID NO: 60 - DNA, 2702 bp, Mus Mus
gttctcttccctctgttggcttgattcctgtgaggacagggcagcagctagagataaacctcagagctctttatacacagcacagtctcttctgtggtagtcacacagtgcagcacacttggacttccaagtagcaaacgccggtctgtacaggtctgtgtgcatttgctgttcctggtgcagacggaagctcttcactggactcaaggcttctgccagaaacctctttctcaaaggagctgtgtcctgtgtgcccacaaccatgggtcagtcttcttctaaacccgatgcaaaggctcacaatatggcctccagccttactgaattcttcaagaatttcaagatggaaagcaaaatcatttctaaggagaccatcgattcaattcagtcatgtatccaagaaggagacatccagaaggtgatttctataatcaatgctgccttgacagacattgagaaagcccccctgaacatcgctgtgacaggggagacaggggcagggaagtccacgttcattaatgcccttcggggaataggacatgaggaaagtgagtcagctgagagtggagcggtggagacaaccaaggacaggaagaaatacacccaccctaagttccctaatgtgaccatctgggatctccctggggttgggacaactaacttcaaaccagaagaatatctgaagaaaatgaagttccaggagtatgattttttcctgatcatctcatctgctcgctttagagataatgaagcccagctggctgaagcaatcaaaaaaatgaaaaagaagttctactttgttcggaccaaaattgacagtgatttgtggaatgagaagaaagctaaacccagttcctacaatagggagaaaatcctggaggtgatccgaagtgactgtgtaaagaatctgcagaatgctaacgcagcctctactcgtgtcttcttagtctcaagctttgaggtagcacagtttgattttcctagcctggagtccacccttttggaagagctgccagcacacaagcgccacatcttcgtgcagtgcctccctaccattactgagcctgctattgatcgcaggagagatgtcctgaaacagacaatctggctggaggctctgaaggctggagcgtcggccaccatccccatgatgtcattcttcaatgacgacattgaggaatttgagaagatcctgagccactacagggcttgctttgggctagatgatgagtcgctggaaaacatggccaaggagtggtccatgtctgtggaggagctggagtccaccattaagtcaccccatttgctgtcaagtgagccgaatgaatctgtggcggacaagctggtgaaaaccatggagaaaatttttgccgtcactggcggattcgtagccactggcctttactttagaaagagttactatatgcaaaattattttcttgacacagtgacagaggatgctaaagttctacttaagaaaaaagtctttttgcaggacagtgtggactctgagtaaggttctaaagatggagagagtgaggcagttggcctgggacttaggtgactttagtgtcttcaggacgctggagagacgactgagggcattcctgaagcaccctggtcaggctgtgatatctcataggctttgtgacccttgggggaaatagagggatcagcattatgtccctcctaacacgagtcttgtacaatgtgctagtgtgaactctctgggcaaggagttttcagaaatgactgtttttagacagggtcttactatggctctcttggatctccttctctacagaagtagaccaggctggccttgaactcacacagaaatcctcctgcctctgcctctgcctcttgagtgctgggattaaaggtatacactaccatacttggaagatttttttttttttgaaaaatatatatatccaccacacgacttgattttgtgctgctttgctgagaacactcccaggctgatgatatcatttacagttttcatatatatggtttgtatatggttcgtataacagagtgtaacagaaaacagtggggacccatcgcctgagtcacagtatttgctgcagcccttctgcagaggtgccattacccaagacagggatgcagtctgaggtttgcacactggagagtcctcacacgttaacagacaatgcttcgtgcatggatcatgacggtaggaaattagaggaaagaaactagtggttgacaaggaagtcctcacccaaaatacagaatttccttaatcatgcgcaaagatactcagtcttccatccagaggctgaaatgtaaattagcagccatgccactttcaggaagtcgaatttgcatgtgagattgtagataagcagtttctgtgatgcagtgttggtgtcaacacaaaatcatgacacagcccgtggtgtgacctctgagaaaattatacatgcagttactctttgacactctttaaatattgccagacagcgcaaacaggtatattaggttttgggttatcagctgtgggactttttaagattgattgtgtctagggactggaaagatggctcagagatttaagagcacatactatcctcatataggacaagagtttggttctcagcgcccatgccagacaactcacaatttcttataactccagctctgggggtgggggtggaggtagaggtggcgtgggg

SEQ ID NO: 61 - DNA, 1580 bp, Mus Mus
cagttcctcagcatggccacctgcagccgccagttcacctcctccagctccatgaagggctcctgtggcatcggtggtggctctagccgcatgtcctccatcctggctggaggatcctgccgggctcccagcacctgcgggggcatgtcagttacctcctctcgcttctcctctgggggagtctgtgggattggaggtggctatggtgggagcttcagcagcagcagttttggtggaggacttggtagtggatttggtggtcgatttgatggatttggtggtggttttggtgctggtcttggtggtggtcttggcggtggtattggtgatgggctcctggtgggcagtgagaaagtgaccatgcagaacctcaatgaccgcctggccacctacctggacaaggtgcgtgccctggaagaggccaacagagacctggaggtgaagatccgggactggtaccagaggcagcggcccactgagatcaaagactacagcccctacttcaagaccattgaggacctgaagagcaagatcattattgccacccaggagaatgcacagttcactttgcagattgacaatgccaggctggcagctgatgacttcaggaccaagtacgagaatgagctgttcttgcggcagtccgtggagggtgacatcaatggcctgcgcaaggtgctagatgagctgaccctgtccagagctgacctggaaatgcagattgaaaacctcagagaagagctggccttcctgaagaagaaccatgaggaggagatgcttgccttgaggggtcagactggtggggacgtcaatgtggagatggacgcagcccccggtgtggacctcagccgcattctgaatgagatgagggaccagtatgagcagatggcagagaagaaccgcagagatgtggaggcctggttcctgagaaagactgaggagctgaacaaagaggtggcctctaacagtgatctaatccagagcaaccgcagcgaggtggctgagctccgcagggtgttccagggcctggagattgaactgcagtcccagctcagcatgaaagcatccttggagaacagcctagaagagaccaaaggcagatactgtatgcagctgtcccagatccagggtttgatcagcagtgtggaggagcagctggctcagcttcgctgcgagatggagcagcagagccaggagtacaacatcttgttggatgtgaagacaaggctggagcaggagatcgccacctaccgccgtctgctggatggcgagaatatccactcctcctcacagcactcctctggacagtcctattcttctcgagaagtcttctcctcatcctcccgccagccccggtccatcctcaaggagcaaggttcaaccagcttcagccagagccaaagtcagagttccagggactaatgttttgcctagagcctcctcacccacaactgcctctcaagctgagggcttggggcaggaccctgttttctttgcgcattccccatctgtctcccctaccctctcatggtggtaggctaataaagctttttggttgatgcaaaaaaaaaaaaaaaaaa

SEQ ID NO: 62 - DNA, 3013 bp, Mus Mus
cggggcccgcagacggagcgaggcggcggcggcggcggggcggcgcagggcgcggggcggcatggccaccaccgcgcagtatctgccgcggggccccggcggcggagctgggggcacagggccgctcatgcatcccgatgccgccgcggcggcggcagcggcggccgagcggctgcacgcgggggccgcgtaccgcgaagtgcagaagctgatgcaccacgagtggctgggcgcgggcgcgggccaccccgtgggcctagcgcaccctcaatggctacccacgggaggaggcggcggcggcgactgggcgggcggcccgcacctggaacacggcaaggcaggcggtggcggtaccggccgagctgacgacggcggcggtggcggcggtttccacgcccgcctggtgcaccaaggggcggcccacgcgggcgcggcatgggcacaaggcggcacagcgcaccacttgggccccgccatgtcgccgtcgcccggggccggcgggggtcaccagccccagccgctcgggctgtacgctcaggcggcctaccccggtggcggcggcggcggcctggccgggatgctggcggcgggaggcggcggcgcgggacccggcctgcaccacgcactgcacgaggacggccacgaggcacagctggagccgtcgccaccaccgcacctgggcgcacacggacacgcacacggacatgcacacgcgggcggcctgcacgcggcggcggcgcacctgcacccgggcgcgggcggtggtggctcgtcggtgggcgagcactcggacgaggatgctcccagctccgacgacctggagcagttcgccaagcagttcaagcaacgacgcatcaagctgggcttcacccaggccgacgtgggactggcgctgggcaccctctacggtaacgtgttctcgcagaccaccatctgccgtttcgaggccctgcagctgagcttcaagaacatgtgcaagctcaagccgctgctcaacaagtggctggaggagaccgactcgtccagcggcagccccaccaacctggacaagatcgcggcgcagggccgcaagcgcaagaagcgcacgtccatcgaggtgggtgtcaaaggcgcgctcgagagccactttctcaagtgtcccaagccgtctgcgcacgagatcaccggcctggccgacagcctgcaactggagaaggaggtggtgcgtgtctggttctgcaaccggcggcagaaggagaagcgcatgacccccgcggccggcgcgggccacccgcccatggacgacgtttatgcgcctggggagctggggcctggcgggggcagcgcgtcgccaccttctgcgcccccgccacccccgccggccgcgctgcaccaccaccaccaccacacactgcccggctctgtgcagtgaccctgcggactgggttccccgccggcgcagcggtgcctccggcgcgcagttagcgcgcgcggcctggactctttttgttgtttattcggttttgctttggattttacaaaaaggaaaaaaaaaaaaaaaaaaaaaagctcagaaacttttaaacaaaaccaaacacccgggaccgacccctctctccagcgagcggcgaaaggcggccgagaggctgtgtcgcccgagtcccgggagagagcagcggaagatccagaatgcgccaactcactctgggcgccctgtgcccactgcctgctccctatccccatcccctcgacgacccccgcccctgcccctgggctgttcggggccggatcccggcagcggcctccccacagcgaaaggtaacgcggtgcggggttagggattccccgggagaatggacgaagagaggagagtccccagcagctctcccgggcgcggactccctgtagcctgcaggtcacgggtgggggctgtcactttattctttccgcgcctcttctctcgcacctggacgcgccccaccccctcaccttttctccgggcttggttttttacggtttttatttattcgtggagcctctcggctcctggggtccttctaactccgcccgcgcccttaatttaaatcgctgtatgctgtatttatcggggccccagaggggaggccgcgagagccgcatctgtgtataaaagcaggaaatagccaaagctttaatctagcctaatttattttccctttctcttcccctctcctccttcaagaacgcaaaacaaaaacaaaaaaaaaaaaactaacaaaaaaattttttttgagtgttcatttttcgtttcgttttacccgagccctcggctcggttcctggcctagcagagagggtctgcgctcccacgcacacccgggtgggaaggggcatctccacccgcaagaccgagcacgcatcgcgggccactgcttccccgccgggccttgcccctcctggccttaacgaacgaaacttggaaaagttggaactattttttaactagctgtagaaataaacccgttccccccaagaaccttgcgcctgtttccctaccgcttccccctgctctctttccggcccccgcgggatgcgggatgctgggggaaccctggggagaaattctccaaatttggggtgaggtgggaaccatgtaaatatgtgagatatgtacacactggcagggggggaagaaacactttgtgcttggtttttattttttggttttctgggttgttctccctccccatcctaaagggtttgtatgcccgactaaaccgaaaaagatattttaatatggtttcctaatttctgacccatctctatttattttctggatgtgtttggagcttcccccttcaccatttcttcatctgtttgttaaggtttcagcttaaattttgtttttattttttattattttcagaacaatgttttggtccattctctttgtatctttattgcaaaaaataataataatgtagactgggaagttccctttatatttatgttatagtaaatattttattactcacataaacatgtaccccaggaaa

SEQ ID NO: 63 - DNA, 3863 bp, Mus Mus
ctctgtaaaccagaaacagaggtctggaaatagaaactaaatcttaccctcattgcagtccctccctttaaggacaaggcagagcaccaagacaccaacactgtgcatcgatctgtttcctgaacatcccagcttagaggattccaaagagagctaccccagtgaccttgctcccagagaagaaggaggtgacatcacaggagggccactggcatcacggctcaggaacagtaccatcgacacacgtccaaggcatgggtcagacttcctcttctacaccccctccaaaagaggatcctgatttgacctccagctttggcacaaatcttcagaatttcaagatgaaaaccaaaatcctgtctcaggaattaattgccttcattgaatcatccctagaggatggaaaccttcaggaaacagtttctgcaatcagcagtgctctgggtggcatagagaaagccccactgaacattgcagtgatgggggagactggggctggaaagtccagtctcatcaatgctctccagggagtgggggatgatgaagaaggtgcagctgcttccacaggggtggtacatacaaccactgagagaacaccatacacttacacaaagtttcccagtgtgacactgtgggacctgcctggcattggatctactgccttccaaccacatgattatctgaagaaaatcgagtttgaggagtatgacttcttcattattgtctcttccggacgctttaaacataatgacgcagaacttgccaaagccattgtgcaaatgaataggagtttctattttgttcgaacccacacagatcttgatttaatggttgtaaaacggagtaatcctaggagattcaacagagagaacacattaaagcagattcgacataccatttcaagtatgcttaaggaagttacccaccaggagcctccagtcttcttagtctctaactttgatgtgtctgactttgacttcccaaagctggaatccacccttctgagccagctcccagcctacaaacaccacatgttcatgctcactttgcctattgttacagattccaccatagaccggaagagggatatgctgaaacaaaaggtctggaaggaatccacaatgccaagagcatgggctaccataccatccctgggactgacccaaaaggacatggagatgttgcaacagactttgaatgactatagatcttcctttggcctggatgaggcatcactggaaaacatcgctgaggatttgaacgtgacactggaggagctcaaggcaaacattaagtctccacatttgctctcagatgagccagatacatccttaacggagaaactattgaagtacattggaaatccttacttttcaaaggttttccatttgcaaaattatttcattgacacggttgcgagcgatgttaaaattatcctcagtaaagaagagcttttcacagagcagcatcctccactgcacacagctacatgccagccttcctctagcagaccctctcctttaatggctcaacttttggtgttcagctttgaaaatttttttaagaatttcaagaaggaaagcaaaatcctctctgaggaaaccatcaccttgattgaatcccatctggaggataagaaccttcagggggcattgtctgaaattagtcatgctctgagcaacattgacaaagccccactgaacattgctgtgactggagaaacagggacaggaaaatccagctttatcaatgccttgaggggagtgagggatgaagaagaaggtgcagcacccactggggtggtagagacaaccatgaagagaactccatacccacacccaaagcttcccaatgtgacaatatgggatttgcctggcattgggtctactaccttcccaccacaaaactatctgacagaaatgaagtttggtgagtatgacttcttcattatcatctcggctacacgcttcaaagaaattgatgcacatctggccaaaactattgaaaagatgaacacaaagttctactttgtccgaaccaagatagatcaagatgtcagtaatgaacagaggagtaaacctaggtctttcaatagagacagtgtgctaaagaaaataagagatgactgctcaggtcatctccagaaggctctctccagtcagcctccagtcttcctagtctctaactttgatgtgtctgactttgacttcccaaagctggagaccaccctactgagggaactcccatcccacaagcgccacctcttcatgatgtccttgcacagtgttactgagactgccattgcccggaagagggatttcctcagacagaagatctggctggaggccctgaaggctggactatgggccaccattccacttgggggcttagtcagaaataaaatgcagaagttggaagagaccttgactctctacaggtcttactttgggctggatgaagcctcactggaaaacattgccaaggatttcaatgtgtctgtgaatgaaattaaggcacaccttaggtctctccagttgttcacaaagaacaatgacatgtccttcaaagaaaaactgttgaaatatattgaatatatttcctgtgttactgggggaccacttgcctcaggcctttactttagaaagacttactactggcaaagtctcttcattgatactgtggcaagtgatgccaagtctctccttaataaggaagagtttttgtcagagaagccaggatcatgcctctctgacctccctgaatactgggaaacaggaatggagctgtgaggtactaaccttagggctggcttcaggcacgaacttaaatcctacttttaagcagcaaacattttctgggagaggattcatttctttcaaagacagaatatcactgtggcaagtggaaagagagttatgcacagtataagcactgtcttccattaaagtaccattatggccatcttgtgtccctggtccctatgagaccattctgcacagagcagctcacagactgcagagggtgagcgagcagactgcagaagcaacacagatgctgggacagaccccagtttctggctccagacatctggacaccttccctgccagaggagaggtgaccatctggaagggctctgactgccagagctggtgggggagccatcttttgtcctgggtccctctgagaccagtctgcccaggtcagctcacagactgcagagggtgagcgagcagactgtagaagcaacacagatgctgggacagaccccagtttcaggctccagacatctgggcaccttccctgccagaggagaagtgaccacctgggagggctctgactgccagagcaggtgagggaaccatcttgtgtcctgggtccctcagagaacagtctgtgcaggtgagcgcaaagactgcagaggcaacacatcttctgggacaggccctgctttgggccttcatcttcagccagttggcaggtctgaacgccagacctctgtgcaccttccctgcaagaggagagcttgcctgcagagagtactctgaccactgagactcaggagcaagctggactcccaggacttctgacagatgctaacaaatcacaggaggaacaggctccagacagagacagctataacaactaacaccagagattaccagatggtgaaaggcaaatgtaagaatcttgccaacagaaaccaagaccgctcaccatcatcagaacccagcactcccatctcagccagtcctggataccgcaacacaccggaagagcaagattcagattcaaaatcatatctcatgatgctggtagaggaccttaagaagggcattaataactcacttaaagaaatacaggac

SEQ ID NO: 64 - DNA, 3365 bp, Mus Mus
ctgtggggtttgccctactgcattctccactgaaatcgatgaggagaaggctctgaaacggatacagacatgtcggatccagactgctgtccagagagagagagtgagacatccctgccacccagagactcttatctgttagaatccctagaacacctttgattgagtttggaagcatctcttggcctgaattaaagtgctatggagcaacttctgagtcccagcaacatgagtgaagaatctcataaaagtcatatacatgacagcctggatgagctgagatgccactttacctgggagctggacataaaagataagcacatccatgacttagaaatcaaaatctcagagactgagttccgtgatcccatctacagcatcgggatgcacaacctcctggcctacgtgaggcacctgaaaggccagcaggacgaagccctgcagagcttgaaagaagctgaagccttgatccagagcgagcagctgagcaagagaagcctggcgacctggggcaactgtgcctggctgcattaccacaggggcagcttggcagaagcccaggtctacctggacaaggtggagaaggtgtgcaaggaattttcaagtcccttccgctacaggctggagtgtgctgagatggactgtgaggaaggctgggccttgcggaagtgtggctcacaaaattatacacgagccatggcctgctttgaaagggctctgaaagtggagccagaaaaccctgagtacaacgctggctatgcagatgtagcctatcacctggattactatgatggtaattctctacaacccttaaagaaggctgtcagtgtaaaaccagaagatccataccttaaagttctccttgccctaaagctgcaggatttaagaaaaacagatgaagcagaaaaacacattaaagaagctacgctcacaatatcctcccagaacaatatctttggatatgtagccaaattttaccgaaggaaaggttgtgtggaggaagctctcgggttccttaaaaaagccttggagacaaaaccttcctctccttacttgcatttccagattggcctttgccataaaacacaattttttcaaatgaaaaaagctacaagcagggagaatagaaaaagagcagaccaatcatgccatttggctatatgtcattttaaaaagactttagagctgaaacccacatatgacagagcatatattgatttggctgaggtgtacgcaaaaaatcatcaacaaaaagaggcagaggacaattttcaggaagtgttgagcatgagtaacttgggagattatatgcagcaagaaattcatttccggtatggcaacttccaacaatactataagaaatcagaagaggcagccatcacacattacttaaaaggcctgaaaatagaggtaacttctcactacagggataaacttctcaaggctttggaggaactggctgaaggacgcaaggaggatcatgtcctggaaagcttgagcctccttgggctcgtctgcagactgagaggggacacaagtgaagccatgtcatgttatgagaaggccctgaggctcacaggagcagtgaaccctgagttttgaggtagagcttcttgttaagcgtgagcatgacttcctattctactagtcttttccagctgttgccttaactatatagaaccccatgaagcaagatacatatgatgccttttctattgcttgcttttctacagccctaatttattgttgagggcctatgagtgtgtgacaagcgtgtccattctcctgccacacatgctggacattttccttatgagtgtgcctttggattgcatctcctataacatcagtcttccagtaccctgatcaaaggacacttgacacattaaggctcatttttcatgggatcttccaaacttcagcaacttctgacagcaaaataaatgagcaatggtgagcattaaaagggagaggaattcaagatatctttacagtgtttcagtccataggcccattttcataggctttactgcagccagaacctgctggtcaatgacctccaccctaataatcaatgcatctttttgtatacaagtggttgatttcagataattgtggtggatttctgtggtctacatatattggtctttattcaccactaagaaagatttaatgcttcaggaagatagaataaagcagtaacttctgtgggatgtgccaacaaaaaaatgacaaaattgctaccggacagtgttcagactatgaagtgttgtgtaatatcaccttgttgctttcctaaccctattatattcgataaaatctgctaatatcacagacttgtgagtgtatttttttttttggaacattaagatctgtattctatgattggatggaaccagagcacagcaaaatcaaactgcatagggttaggagggacaaagcaaggaagctctgggaatatacacactactgaaccttaaagaatacagggggaaagagagaggaggttagactatgagaagggtgtctgaaagactcctaagaagttgtattagttactctctatgtaaaattctttaatacctgtaagtcagtgtgtgtcatgcgctctggttgagtcagcttaagccgagaggcttaaaagtcactcatgaggcaaagagcttcaaggaagctctcttcctggagtctggcgtttcctttaacccatacattaatttttcattcttgagttagtctagtgtatggatctacatgctttcttttagtattttcctattataagtgccttttaagattaaattttgacatagctaaagccttttgtcagtgttccaacagtcttagaacgtccttgaggaagatcatgggcttaaaatttagtaggaatgttactaatcagaatagccttttgtactatactatcacttttaataaaagctaggtcactcccttacacaggaatttactatcactaggaagaaggaagtttcagaccaaaggagaaaccagaatagatacttagaactatagcgaagttacacccatacacacgtatttacaatggcctaaggggaaggtaaactatataatagagtaaaataggaactatggcaaaggagcatagcccttgaccctggcttctaagattagtgaatcttagatagagcccttgtttatcccagttgttatcaataaattttatcccaggtaattttcgttagaccttttgtgtttgcatttctctgttttacgtaagattccagttacctcatttgtaccttgcaaatatgtcacccaacttccttattgtcttctacataaaaagtctaatgcttgatttaaaaaatacattcagatctaac

SEQ ID NO: 65 - DNA, 674 bp, Mus Mus
agcacagcactcggccagcttctgaagcttctgggccctgcagtcccagctctgtgcaaacctaaccccgagcaacaccatgaagctctgcgtgtctgccctctctctcctcttgctcgtggctgccttctgtgctccagggttctcagcaccaatgggctctgaccctcccacttcctgctgtttctcttacacctcccggcagcttcacagaagctttgtgatggattactatgagaccagcagtctttgctccaagccagctgtggtattcctgaccaaaagaggcagacagatctgtgctaaccccagtgagccctgggtcactgagtacatgagtgacttggagttgaactgagcagctccagcggcagggcaggaggagccacttcaggagaggcctcctcagccctgatgcttctcactgagaagcgtccttgctcctcacgttcagatttcctgcccctcttcttaatttaaatctctgtgtagactttgttttgtttttttgggggagtattatttctattatttatgttttagttataggacgcgtgtctcccatggagatggtccaccattgctgtttctctgctattgtggatatgactgtgaaattgatttcatgcattttcataataaatctttctttaagatataaaaaaaaaaaaaaa

SEQ ID NO: 66 - DNA, 2424 bp, Mus Mus
acactccgtctccaagccgggaggggtgagtattgcacaggattctgtggaaggatagaggataccttctaaggcttctttgtagacactgagtacccaactgagagaagaaataaaagatggttcttagcacagaagaaaacacaggcgttgattcagtcaacttacccagtggagagacgggcctaggagagaaagaccaggagtctgtgaacaatctctgcagtcagtatgaggagaaggtgcggccctgcattgacctcatcgactccctgcgggctctgggtgtggagcaggacctggccctgcctgccatcgctgtcattggggaccagagttcagggaagagctctgtgctggaagcactgtctggagtggccctccccagaggcagtggtattgtcaccagatgccctctggtgctgaaattgaggaagctgaatgagggagaggagtggagaggcaaagtctcctatgatgacatcgaagtggagctctctgatccttcagaggtggaagaggccatcaacaagggtcagaacttcattgctggggtaggtctggggatcagtgataagctcattagcctggatgtcagctccccaaatgtcccagacctgactctcattgacctgcctggaattaccagggtggctgtaggcaaccagcctgcagacataggacgccagatcaagagactcatcaagacatacatccaaaaacaggagaccatcaacctggtggtggtccccagcaatgtggacattgccaccacagaggctctgagcatggctcaggaggtggaccctgaaggggataggaccatagggatcttgaccaagcccgatctggtggacagaggtactgaagacaaggtcgtggatgtggtgcggaacctggtgtaccatctgaagaagggctacatgatagtcaagtgcagaggccagcaggacatccaagagcagctgagcctgactgaggctcttcagaatgagcaaatcttcttcaaggaacaccctcatttcagagttcttctggaggatgggaaggccacagtgccctgcctggcagagagactgaccgcagagctcatcttacacatctgtaaatctcttcctctgctagaaaatcaaataaaggaaagtcaccagagtgcaagtgaggagctgcagaagtacggtatggacataccagaagatgacagtgaaaaaacgttcttcctgattgaaaaaatcaatgcttttaaccaggacatcactgccctagtacaaggggaagagaatgtggcagagggagaatgtcgcctattcaccaggctccgaaaagagttcttgtcctggagtaaggagatcgaaaagaatttcgcaaaaggttatgctgttttatataatgaagtctgggcatttgaaaagcagtaccgtggacgagaattgccagggtttgtgaattacaaaacatttgagaacattataagaagacaaatcaaaaccctggaagaaccagctatagaaatgctgcacacggtcactgaaattgtacgagctgcctttacaagtgtttctgagaaaaatttttctgagttttataacctccacagaactaccaagtccaaacttgaagacatcagattagaacaagaaaaggaagcagagatgtcaatccgactccacttcaagatggaacaaattatctactgccaggaccagatttacagaggagccttgcagaaggtcagagaggaggaagctgaggaggagaagaagacaaagcatggcacttccagttcctctcagtcccaagatttacagacctcatccatggctgagatcttccagcatctgaatgcctaccgccaagaggctcacaaccgcatctccagccacgttcccttgatcatccagtatttcatcctgaaaatgtttgctgagcggctgcagaagggcatgctccagctcctgcaggacaaggattcctgcagctggctcctgaaggagcagagtgacacaagcgagaagaggaagttcctgaaggagaggctggcaaggctggcccaggctcggcgccggctagccaaattccctggttaagctggctctgtccttccctgtgtttcctggattgtgattcagggacagaagggctcctgcctttcctggtagctataccaccagcctttatgctctgataagtgctagcactcagatttgaaggagctttctgctcactctgagataggaagagaaagaggctctcaaagctcagcaagtagatgggtagaggaagccactttgctaataagacaacggcttcacctgagtactcttcttgcccaccatttagcacactgccagaaataaatatttgatgtacaaatgggagctgcctgttacattccttaataaaccacttttctttaaaaaaaaa

SEQ ID NO: 67 - DNA, 2124 bp, Mus Mus
agagccatgctcccaagcttctctcttcacccccctttccgccattgggtgccagaggtcagctggaaaggagccgccttaaaaaaggaggagccatggcagtcgcccaggagctgtacggcttcccggcctccaagctggactcctttgtggctcagtggctgcagccaaccagagagtggaaagaagaggtcctggagaccgtgcagacagtggagcagttcctgaggcaggagaatttccgtgaagatcgtggcccggctcgggatgtgcgcgtgctcaaggtactcaaggtaggctgctttgggaatggcaccgtgctcaggagcactacagacgtggagctggtcgtgttcctgagctgtttccacagcttccaggaagaagccaagcaccatcaggctgtcctgagactgatacagaaaaggatgtactactgccaggagctgatggaccttgggctcagtaacctgagtgtgactaacagagtacccagtagtctcatcttcacgatccagaccagggagacctgggagaccatcactgtcaccgttgtgcccgcctacagagccctgggcccttcctgtcccagctccgaggtctacgcaaatctgatcaaggctaatgggtacccaggaaatttctctccatccttcagcgagctgcagcgaaacttcgtgaagcatcggccgacgaagctgaagagcctccttcggttggtcaaacactggtaccagcagtatgtgagagacaagtgcccccgggccaacctgccccctctctatgccctggagctgctcactgtctatgcctgggaagcgggcacccgggaggatgccaacttcaggctggatgaaggcctcgccacggtgatggagctgctccaggatcatgagctcctctgtatctactggaccaagcactacacgctgcagcacccggtcatcgaggcctgtgtcaggagacagctcaggggacaaaggcctatcatcctggacccagcagaccccaccaacaatgtggcagaaggctacagatgggacatagtggctcagcgggccaaccagtgtctgaaacaggactgttgctatgacaacagggacagccccgtccccagctggagggtgaagagagcacccgatatccaggtgaccgtgcaggagtgggggcactcggatttaaccttctgggtgaacccttatgaacccataaagaaactgaaagagaaaatccaactgagccagggctacttgggcctgcagcgtctgtcctttcaggagcccggcggagaacgtcagctcatcagaagccattgcacgctcgcctactacggaatcttctgcgacacccacatctgcctgctggacaccatctcccctgagatccaggtctttgtgaaaaacccggatggcaggagccacgcctatgcgatccacccgcttgattacgtcctgaacctgaagcagcagatagaagacaggcagggccttcgatgccaggagcagcgcctggagttccagggccacatcctggaggactggtttgactttaaatcctatggcatccaagacagtgtcacagtcatcctgtccaagacgacggagggggcagctccatttgtgcccagctagcttcctctgtcggtggctctgcctgttttattgtctcatcctagactcagcctagttgcctctccttcccgtcctctgcccggatggtccacgtcttcagtaccttgccagcagggagtcagagggggtgtgagaagtcgtgtacagccagacactcttgtgtgacaatggaattctgcagtcccctgggaagtcatgccaggacctctgccttcctcgtggcctcactgtcaagactgtgtcagtgaatagctggcctcacagactattctcacatgttcagagaaagccaaaccatcttcctaaccaatcacagggaccctgcttgaggttgtcccacctccaaattcttcccagtgacctccatcagggcggctctgaagccttcccctgtgcccccaaccacttctgcctgccttcgactatccaaggcaaggtaggaggggatcaagttcctttcaaatggagaataaaaaagccattgtttcttccc

SEQ ID NO: 68 - DNA, 3653 bp, Mus Mus
gaaatcgtggtccccaagcctcatgccaggctgcacttgcacgtcgcgggccagtctcctcgcctgcagatagttcccaaaacatgaggatatttgctggcattatattcacagcctgctgtcacttgctacgggcgtttactatcacggctccaaaggacttgtacgtggtggagtatggcagcaacgtcacgatggagtgcagattccctgtagaacgggagctggacctgcttgcgttagtggtgtactgggaaaaggaagatgagcaagtgattcagtttgtggcaggagaggaggaccttaagcctcagcacagcaacttcagggggagagcctcgctgccaaaggaccagcttttgaagggaaatgctgcccttcagatcacagacgtcaagctgcaggacgcaggcgtttactgctgcataatcagctacggtggtgcggactacaagcgaatcacgctgaaagtcaatgccccataccgcaaaatcaaccagagaatttccgtggatccagccacttctgagcatgaactaatatgtcaggccgagggttatccagaagctgaggtaatctggacaaacagtgaccaccaacccgtgagtgggaagagaagtgtcaccacttcccggacagaggggatgcttctcaatgtgaccagcagtctgagggtcaacgccacagcgaatgatgttttctactgtacgttttggagatcacagccagggcaaaaccacacagcggagctgatcatcccagaactgcctgcaacacatcctccacagaacaggactcactgggtgcttctgggatccatcctgttgttcctcattgtagtgtccacggtcctcctcttcttgagaaaacaagtgagaatgctagatgtggagaaatgtggcgttgaagatacaagctcaaaaaaccgaaatgatacacaattcgaggagacgtaagcagtgttgaaccctctgatcgtcgattggcagcttgtggtctgtgaaagaaagggcccatgggacatgagtccaaagactcaagatggaacctgagggagagaaccaagaaagtgttgggagaggagcctggaacaacggacattttttccagggagacactgctaagcaagttgcccatcagtcgtcttgggaaatggattgagggttcctggcttagcagctggtccttgcacagtgaccttttcctctgctcagtgccgggatgagagatggagtcatgagtgttgaagaataagtgccttctatttattttgagtctgtgtgttctcactttgggcatgtaattatgactggtgaattctgacgacatgatagatcttaagatgtagtcaccaaactcaactgctgcttagcatcctccgtaactactgatacaagcagggaacacagaggtcacctgcttggtttgacaggctcttgctgtctgactcaaataatctttatttttcagtcctcaaggctcttcgatagcagttgttctgtatcagccttataggtgtcaggtatagcactcaacatctcatctcattacaatagcaaccctcatcaccatagcaacagctaacctctgttatcctcacttcatagccaggaagctgagcgactaagtcacttgcccacagagtatcagctctcagatttctgttcttcagccactgtcctttcaggatagaatttgtcgttaagaaattaatttaaaaactgattattgagtagcattgtatatcaatcacaacatgccttgtgcactgtgctggcctctgagcataaagatgtacgccggagtaccggtcggacatgtttatgtgtgttaaatactcagagaaatgttcattaacaaggagcttgcattttagagacactggaaagtaactccagttcattgtctagcattacatttacctcatttgctatccttgccatacagtctcttgttctccatgaagtgtcatgaatcttgttgaatagttcttttattttttaaatgtttctatttaaatgatattgacatctgaggcgatagctcagttggtaaaaccctttcctcacaagtgtgaaaccctgagtcttatccctagaacccacataaaaaacagttgcgtatgtttgtgcatgcttttgatcccagcactagggaggcagaggcaggcagatcctgagctctcattgaccacccagcctagcctacatggttagctccaggcctacaggagctggcagagcctgaaaaacgatgcctagacacacacacacacacacacacacacacacacacacacacacaccatgtactcatagacctaagtgcaccctcctacacatgcacacacatacaattcaaacacaaatcaacagggaattgtctcagaatggtccccaagacaaagaagaagaaaaacaccaaaccagctctattccctcagcctatcctctctactccttcctagaagcaactactattgtttttgtatataaatttacccaacgacagttaatatgtagaatatatattaaagtgtctgtcaatatatattatctctttctttctttcttcctttctttctttctttctttctttctttctttctttctttctttctttcttccttccttccttccttccttccttccttccttcctttctttctttctttctttttttctgtctatctgtacctaaatggttgctcactatgcattttctgtgctcttcgccctttttatttaatgtatggatatttatgctgcttccagaatggatctaaagctctttgtttctaggttttctcccccatccttctaggcatctctcacactgtctaggccagacaccatgtctgctgcctgaatctgtagacaccatttataaagcacgtactcaccgagtttgtatttggcttgttctgtgtctgattaaagggagaccatgagtccccagggtacactgagttaccccagtaccaagggggagccttgtttgtgtctccatggcagaagcaggcctggagccattttggtttcttccttgacttctctcaaacacagacgcctcacttgctcattacaggttctcctttgggaatgtcagcattgctccttgactgctggctgccctggaaggagcccattagctctgtgtgagcccttgacagctactgcctctccttaccacaggggcctctaagatactgttacctagaggtcttgaggatctgtgttctctggggggaggaaaggaggaggaacccagaactttcttacagttttccttgttctgtcacatgtcaagactgaaggaacaggctgggctacgtagtgagatcctgtctcaaaggaaagacgagcatagccgaacccccggtggaaccccctctgttacctgttcacacaagcttattgatgagtctcatgttaatgtcttgtttgtatgaagtttaagaaaatatcgggttgggcaacacattctatttattcattttatttgaaatcttaatgccatctcatggtgttggattggtgtggcactttattcttttgtgttgtgtataaccataaattttattttgcatcagattgtcaatgtattgcattaatttaataaatatttttatttattaaaaaaaaaaaaaaaaa

SEQ ID NO: 69 - DNA, 3757 bp, Mus Mus
gtgcctatcaccatggggatgctggtgcccactgctctagctgctcggctgctgagcctgttccagcagcagctgggttccctctggagtggcctggccatcctgttctgctggctgagaatagcattagggtggctagatcccgggaaggaacagccacaggtccggggtgagccggaggacacccaggagacccaggaagatgggaacagcactcagcccacaacccccgtgagtgtcaactaccacttcactcgtcagtgcaactacaaatgtggcttctgcttccacacagccaagacatccttcgtgctgcccctggaggaggccaagcgaggactgcttctgctcaaacaggctggtttggagaagatcaacttttctggaggagaacccttccttcaggacaggggtgaatacttgggcaagcttgtgagattctgcaaggaggagctagccctgccctctgtgagcatagtgagcaatggcagccttatccgggagagatggttcaaggactatggggagtatttggacattcttgctatctcctgcgacagcttcgatgagcaggttaatgctctgattggccgtggtcaaggaaaaaagaaccatgtggaaaaccttcaaaagctgaggaggtggtgcagggattacaaggtggctttcaagatcaactctgtcattaatcgcttcaacgtggacgaagacatgaatgaacacatcaaggccctgagccctgtgcgctggaaggttttccagtgcctcctaattgagggtgagaactcaggagaagatgccctgagggaagcagaaagatttcttataagcaatgaagaatttgaaacattcttggagcgtcacaaagaggtgtcctgtttggtgcctgaatctaaccagaagatgaaagactcctaccttatcctagatgaatatatgcgctttctgaactgtaccggtggccggaaggacccttccaagtctattctggatgttggcgtggaagaagcaataaagttcagtggatttgatgagaagatgtttctgaagcgtggcggaaagtatgtgtggagtaaagctgacctgaagctggactggtgaggctgagatgggaaggaaactccgaccagctacagggacattcacgcccagctatccttcaacaagctacatcttctggctatctacggactgttgttattagaatacagtctgtttatttttctttcagtttgactgaactaaaaagggagtaaaattatgcagcagataatcgtcctccacaggagagagttcggttctcagaggagcaaggtccagtgacccctaagaaccagcatttcatttatatttgaatttttgtgtggattttactgtgaatcccacatttcctttttcctttttgttccccttgagaaactgggttattttttgctaactatgccaattttgtcaacaggaaacttcacaaaacacaccctccaattactgctgactattctaatgcttttctgctttggaatattggactttttactcaaaagtgtagaatcaaggcatatctcatagagccttaagttagaatcttactcttatggaaggagttatttcctagaacaggctgtttgttcatggtcccagcctctgatgctgctgcttcaagatggctgctttatactgcagcaattccttcagggttcttgacaaagccaaggtacactttacctcccagggtgtggccatgaggatgccacttctgcagctgcaactgccctggcattgaggctgcttgagtctctcatgctgaaaggttgtcacacttttctgaaaagctccaaggccatgtggcacgtccagaagagtcgtggggggatagacaggaaggagtctttcaggaatataaaatgtggcagctggcttggtataaatgtgcctgtggttccttagcatatctttcaagaaacactgaaacttgacctagtctaggtcaacatgagaaaaacaaaaaaacaaaacaaaacaaaacaaaaaaaaaaaaacaaaaataacaaaaacaaaaccaaaaacagttccttctttacaccaaaaaggcaaaagacagaatgtgaactagccaaaatcttcctgtggaagcattgcatgaggttattaagcctagacagtgcctcactgcttggaaaataatttcctatcaaagagtaaagccatggaaaattttgttctgtccaagaaactgaactcccctgtagttccactgtggccgctagagggccccgggaagtcagacctcattaagtatctcagaaactttgcttctgagtctatttttaggacttggtggattttggttctgttccttctttgttttatttgcttttgtttggggtttttttttggtgcttatattaatactaaaatttttctaaggaactggaatttggggtatttactcacaaaagatgttcatactttagttaggtcattataattcaactgagacacactttgtctcatgaaaaatataggtcagggttttctgtgttttctagtgtgtgtgtgtgtgtgtgtgtgtgtgttttacctatttttgcttgagtataaatataactatgtagcccaggctggcctggaactcatgatacctctgccctaacctcaccctctcaagtgctagggattgcacgtgtgtattaaccaactcctatgtagatttttctatgtgaaatttgagtcacattccccctgaagattgtgatttttttttttagttaagtcctgtgtgcttagttcacctgggaaatcccagaggacatggccagacacccacttgatcaaatgagaggaaagcaatcatgaagctgaggtccaaccttctgaattgcagtatattttctcctggctgagggaagctgcatgtctctttccctgattaaagtagaacatgatgagaatctgcttgggaaatgagccaccattctaaatgtacccccccaccccccgccttgtgcatgcacaggaggtgtgtgagatctctgtgcttaaaatattcaaaaatctccctttcctaaaggaaagaattacaatattttattatcacagtaaagatcaaacttggattagatcattcattggttacattttcagtgttaaatctgggtgctcattttgtgaagcagatgctctctgctgggagaataggggatgatctagtggacatttgttaagtgttacaggctgatgccttgtgtcccatgactgattgatgcagagtagtaatgctgtgaagggggttttactcaagaacttcagaggctaggacatctcacactgattttacagcctttggtgtctctgttataatgtgttcaatgataaaatcagtgggctgtgtttttgtaagagggacgcttcatggtgttatttgaaaaaaaaaaaaaaggtcccaggtttcgatctgtttggagtttggagtctaatggttgcatagataaacaggcgaccaatcacacccagcagcagttagctccttaccgcagtaactcagctcatggactgccctcttgatggattgatgttgtttcataagctattattagacaaagaaccatcacgcaggcctcatgtgagtatgtccagatgaggtctaatgctcagggatatatgtatatgtatctctctgtggaattacactgtgttctgaggcagtcgctctaatgtatggtaacatgatctgtgaattaaaatgttctatacgtgg

SEQ ID NO: 70 - DNA, 2563 bp, Mus Mus
aggacccgcccccgctgcagtcactggaggaactggaagttaaccgttcctgctgagaaatcggtgtgtttcctttggctgctcctaggtgagggtttgctgtggtctagcctgggaagtaggtctagcccaagtccagcctgaacagagcgagcctgtcgccatgccggcttgctgcagctggaacgatgtcttgcagtatgagacaaacaaagtcacccggatccagagcacgaattatggcaccgtcaagtgggtcttgcacatgatcgtcttttcctacattagctttgctttggtgagcgataagctgtaccagcggaaagagcctgttatcagctccgtgcacaccaaggtcaaaggcatagcagaggtgacggagaatgtcacagagggtggggtgacgaagttaggacacagcatctttgacactgcagactacaccttccctttgcaggggaactcattctttgtcatgacaaactatgtcaagtcagaaggccaagtgcagacgctgtgtcctgagtatcccaggcgcggtgcacagtgctcttctgaccggcgttgtaaaaaggggtggatggacccacagagcaaaggaatccagactggcaggtgtgttccatatgacaagacaaggaagacctgtgaagtctctgcctggtgtcctactgaggaggagaaagaagctccccgacctgcactcttgaggagcgccgaaaacttcaccgtactcatcaagaataatatccacttccccggccacaactataccacgagaaacatcttgccaactatgaacggctcttgtacctttcacaagacttgggaccctcagtgttccatcttccgactaggggacatcttccaggaagcaggagagaactttacagaggtggcagttcagggaggaatcatgggtatcgagatctactgggattgcaacctagacagctggtcccatcactgccgacccaggtacagcttccgccgcctggatgacaagaacacggatgagtccttcgtccccggctacaacttcagatatgccaagtactataaggagaacaatgtggaaaagcggacgttgatcaaagccttcggcatccgttttgacatcctggttttcggcactggaggaaaatttgacatcatccagctggttgtatacattggatccaccctgtcctactttggcttggccactgtgtgcattgacttgctcatcaacacatactccagtgctttctgcaggtcgggggtttacccctactgtaagtgctgtgagccctgcacagtgaacgagtattactacagaaagaagtgtgagtccatcatggaacccaagccgacgttgaagtatgtgtcctttgtcgacgagccgcacattcgcatggtggaccagcagctgcttgggaaaagtctgcaagttgtcaaaggccaagaagttccaacctagatacttgtttctcacagaacagagactttgagtattatgagatgctttgactgactctaagacttgccattttaaggcgtctaagatcaagaagccatgctctcaatggagagggtggggctgaggcaccttcatgaaggaggcccatgctcacaagcctgacggatgacctcagacggatgacctcagacggatgacctcagacggatgacctcagacggatgacctcagacggatgacctcagttccatcctcgggacccacacagtggagagagcactgacttccacatgcaagcatggcatgtgtccacccccagtctcccagtaaatgaatttaagtccattttcactgtatttttgtttgtttttggttttgttattctttttcaagactggaaagccctggctgtcctggaattcacgtgtagaccaggctggccttgaactcagagattccacctgcctctgcctcccgagtgctgggattaaagggtgtagcaccaccaccaggctcggagatatttttttaaagtagactgtatttgacttcagagttgagctttttactccaagcattctatggaagagctacaggcttccctccctgtagcctcccagtctctacacctttatctttgatgcctacttccaagtgtacttatatcgccttgctaaggcttcagacagtgactgaccactggactcttctagtgtttccttgtgcctttggccactggtgctctcctgagggtgacatgccactctgtggataaaaatgacgctttcttcagcagcaatgatatttgcatctttatttttggtctactgcgtgggcaatgccgtggtctgaggccgtgagcagttcatttctcagggtaaagttcttgttgttagatgcattctgttctgtcagttgcccggtagccatgccttccttggtcagaactgagagcagcttcctgacgcagcccggctgacttcctggacgactgggggtgggttttcacttctctctttaaagggaaccatcttctaaactcttcctaatttcgtgtaagggttttttttaaaactatttcataataaaacttgatttcaattc

SEQ ID NO: 71 - DNA, 1681 bp, Mus Mus
ctgaaggagggcagacccgtgccgttggtggtggctgtgctgtgggctgcagtgagaaacagacccggtattttctacttcttggatctgagcttccctggtaactgccatggatcagttcatctcagccttcctgaagggtgcttcagaaaatagtttccaacaattagctaaggagtttctgcctcagtactctgcattaatcagtaaggcaggaggcatgctctctccagaaaccctcactggtattcacaaagccctccaggagggaaatctctctgatgtcatgatccagattcagaaagcaattagtgctgcagagaatgctatcctggaggtggctgtgatcgggcagtctgggactggcaagtccagttttataaatgcccttcgagggctgggccacgaagcagatgaatccgctgatgttgggactgtggagaccactatgtgtaaaaccccctatcaacatccaaaatatcccaaagtgatcttctgggacctgcctgggactgggacacccaatttccacgcagacgcttatctagaccaagtgggatttgccaactatgacttcttcatcatcatttcttcttcccgcttcagcctcaatgatgctctcctggctcagaaaataaaggatgctgggaagaagttctactttgttagaaccaaggtggatagtgacttatataatgaacagaaagccaaacccatagctttcaagaaggagaaagtccttcagcagattcgagactactgtgtgactaatctcatcaaaactggggtgactgaaccatgcatcttcctgatctccaacttggatctgggtgcgtttgatttccccaagctggaggagactctgctaaaggagctccctgggcacaagcgtcatatgtttgccctgctcttgcccaatatctcggatgcttccattgagctaaagaaacattttcttcgggagaagatctggctggaggccttgaagtcagcagctgtgagcttcatccccttcatgactttctttaagggctttgatttgcctgaacaagaacagtgcttgaaggattaccgaagctattttggcttggatgatcaatcgattaaagagattgctgaaaaattgggcgcacccttggcagacatcaagggggaacttaagtgcttggatttctggtcccttgtaaaggataacagcataatagcgcaagctacgagtgctgctgaagctttttgtgctgtgaaaggaggccctgaatcttctgccttccaggctttaaaagtctattataggcgcacacagttccttaacatagtggttgacgatgctaaacatctcttgagaaagatagaaacagtaaatgttgcctagctaaacagtgaatggatttcaaattgtgtgtccaaattggcaatggggttggttgtccttccaccaaactcccaggccagctcttccctaagctccacagaagtgtatcccatgaaggaagtccattgcttccctctagagattactaccatgcatgaattgttttttgctcataccctgtttcctgtgttcattgatttattattcttgataatagtcagcaataacataccacctgcctctgtgttaagagataacctgtttctgatccatttgtaccaataaaaaaagtttgtaataaaaaaaaaa

SEQ ID NO: 72 - DNA, 522 bp, mus mus
gcacgagtcgatctcccacagcctctgccgcgggtaccatgaagatctctgcagctgccctcaccatcatcctcactgcagccgccctctgcaccccggcacctgcctcaccatatggctcggacaccactccctgctgctttgcctacctctccctagagctgcctcgtgcccacgtcaaggagtatttctacaccagcagcaagtgctccaatcttgcagtcgtgtttgtcactcgaaggaaccgccaagtgtgtgccaacccagagaagaagtgggttcaagaatacatcaactatttggagatgagctaggatagagggtttcttgattctgaccctgtatacgcttccctgtcatcgcttgctctagtcctagccagcttggggatgccactccagtaatcccctactcccactccggtcctgggaaaatcggcatctccatccgctccgaccggctctcgaccacgaaacccaagaaatcagcatttcattaaaatttccatgatgcaacggacaa

SEQ ID NO: 73 - DNA, 2061 bp, Mus Mus
aaggactcttaaggaaagggcggggcctggggacctttcctgagtgaggcggtttcgagacttcgaaggctcgccaagttctcggagaagcttgccctagctgtgacgaaaggccgtggtgaggagcggggagactcttcctccgtatcgcatgctgccgacatgagctctttgggtaaggcggcagtccccacagcctgtgatgatgaggacacccttcttaccggagatgcgaactcccagcatcaggtgtctggttctgaagctggcttgagccaggagggcagggagcggttaggggaccctgtgatcagcccaggagttgcagagggtccgagccccctccaagggcctctggagatcagagagggtgaggccagcctcccgggccccgagagcagtgacttagggtctgggtctaagatggaggcaacagaggacacaggcagcatgcttagggatccggaaggcggggccacttctcccgtagaccaagaagaagaagttgacatggatttcttgccccagctcagtattgaggccatgactgtcatgcgagagctgaccaacctacagctccgaaaagtctgcaggtacccgtccccacgaacttgtgcggctgaactggctgccctctggggaaacgtagatgaaggctccaacagaggggcactgtctccgagctctgtgagagggaaacagggccccgaaggtgcactgtaccccagaggcctggggcgaggcagagcctgggggaccccaagaagacacaccataggtaggatggtgagcagtgaaggtgtccactatccctcctcaaaccctgtgtcttctgatgagttcagtgacactcatgtgatgaaaggaaccgctggcctcaaagaagaccaggccaggtccagtggcctcactgagctggataacatagccagacacacaaatgtccgtggcagaggaaattttgtccatattcccccttctgtactgtccagtgctacctggggagtcagctcaggcatggaaaggcaggcttcaggagaacaggaaagctctttggctaagaaaaagccaaatatggtctggggcaaagaagggagcaggcccagccaccatggagtgactgcagctgctgccaccgcctctgctgctgcccctgcctcagcttctacagcttcaggtgccctgcccaagaccagtcccaaaaagaagcaagctcaagagaagacctcctcctcagatgtctcaagaggataccaggggaaaaacttgccaacatggggacagagactcaaatcagcatttgaggggccaacgactctacccccaatctcaggggttgctctgctagggaaggcaagtaaatgctcactgccttcagggcccaaagagttcaagtccatctgcactgggaagaaatccatagcaaagaagacaagggagccacaggcagggcccaaagaagataactcaccgagagatcctggtctgcaggcccaagttccaccacacagggcagagcagccttccgtgtgcatgtatcgtggagaaatgagcaggggagacttcaacatcagagcccctcaagttccagcaaacccgcagttcttctccttgagccagagatgtgccagacccagagcaccacctgcacctgctggtgaacagaatcaacttatggatcccatattccctaatgaagaaagtcagcaagtaatacatgggacaccaggttgtgcacagtgtgagatgttacagaaggaaatagatgaactcaaggaacaactcgggctggcactgctgtgacccagcgtttgaggactgcctatccatgctgttctcctcggtcatgcaggccctcagtgaaacgttccaggatccttgaagttggactcaagagtttctccccacagaagaggccaaactaccacctgtggatcctgcttccttccagttttcttcgacagcagtggttcccaccttcctaatgctatggcctgctcatgggcttcattttgtgatgttaaccctctaccataaagctatttcattgttacttcacag

SEQ ID NO: 74 - DNA, 1527 bp, mus mus
ggggaggggcctgtccggggacgggccaggtgtgtggctggcgttgcagagaccagagctgctgagacaaggaagcagcagtcaccctgggggccacagaagggccctcagtggcgtccatggctggcctggaccccacactgagcacaagtcacccattctatgatgtggccagacacggcatcctgcaggtggcaggggatgaccgccaggggagacgcatcttcactttcagctgctgccggctgccacccttgcaccagctcaaccaccagcgcctgctggagtatctgaagtacacactggaccagcatgtggagaacgactatactattgtctactttcactatggcctcagcagccagaacaaaccatccctaggctggctccagaacacctacaaggagtttgaccggaagtacaagaagaacctgaaggcactgtacgttgtacaccccaccagcctcatcaaagcactgtggaacatcttcaagcccctcatcagtcacaagtttgggaaaaaagtcacctactgcagcaacctgcgtgagctccgagaacaccttcagtgcgaccagctgctcatccccccggaagtagtgcggtatgacgagaaactgcaaaacctgcacaaaggtcaaccgcccccgcccaccaagacaccgccacctcggccgcctctgcccacccagcagtttggcgtcagcctgcaatacctcagagacaaaaatcaaggtgaactcatccccccggtgctgcgttggacggtgacatatctgagagaaaaaggactgcgcactgagggcctgttccggagatcggccagcgcccagactgtccgtcaggtgcagcggctatatgatcaagggaagcccgtgaactttgatgattatggagacatgcacctcccagccgtgatcctgaagacatttctccgagagctgccccagccactgctgaccttccaagcctacgagcagattctcgggatcaccagtgtggagagcagccttcgagtgacccactgccgcctgatcctgcggagcctcccagaacacaactatgccgtactccgctacctcatgggcttcctgcatgaagtgtctctggagagcatttcaaacaagatgaacagctctaacctggcgtgcgtgtttggattgaacttgatctggccatcccagggggtggcttccctgagcgccctggtacctctgaacttgttcacagagctgctgatagagtactatgacaaagtcttcagttgccaggaggcccctggggagcacacccgggatactgtggaagtacagcaggctggccctgttaccaaagaatttatgaagacgggcactccccgggcctcaccatacctgtcccgcctccgtatctcctgactagcttgagacacctcaagatggagactggagatgcccccttccaatctaggcatctgtgtacctgtttgtcttatgaacttactatctttaagaagacacaggaattaaatgaacccagaacttccta

SEQ ID NO: 75 - DNA, 2102 bp, mus mus
ggcgtcttggtgggacttcagctttccagagtttatgactactgtgcctgcagcatcatggccacgtgcctgttcctcctgggccttttcctgctgctgccacgacctgtccctgctccctgctacactgccactcggtcagaatgcaagcagaagcacaagttcgtgccaggtgtatggatggctggggaaggcatggatgtgactaccctccgccgctccggctccttcccagtgaacacacagaggttcctgaggcctgaccgcacctgcaccctctgtaaaaactccctaatgagagacgccacacagcgcctacctgtggcaatcacccactggcggcctcacagctcacactgccagcgtaatgtggccgcagccaaggtccactccacggagggtgtggcccgggaggcagctgctaatatcaataacgactggcgtgtggggctggatgtgaaccctaggccagaggcaaacatgcgcgcctccgtggctggctcccactccaaggtagccaattttgcagctgagaagacctatcaggaccagtacaactttaatagcgacacagtagagtgtcgcatgtacagttttcgcctggtacaaaaacctccactccaccttgacttcaaaaaggcgctcagagccctcccccgcaactttaacagctccacagagcatgcttaccacaggctcatctcctcctatggcacgcactttatcacggctgtggacctcgctggccgcatctcggtccttacagccctgcgtacctgtcagctgaccctgaatgggctcacagctgatgaggtaggagactgcctgaacgtggaggcccaggtcagcatcggtgcccaagccagcgtctccagtgaatacaaagcttgtgaggagaagaagaaacagcacaaaatggccacctctttccaccagacctaccgtgagcgtcacgtcgaagtacttggtggccctctggactccacgcatgatctgctcttcgggaaccaagctacaccagagcagttctcaacctggacagcctcactgcccagcaaccctggtctggtggactacagcctggagcccctgcacacattactggaagaacagaacccgaagcgggaggctctgagacaggctatcagccattatataatgagcagagcccggtggcagaactgtagcaggccctgcaggtcaggccagcataagagtagccatgattcatgccagtgtgagtgccaggattcaaaggtcaccaaccaggactgctgcccacgacagaggggcttggcccatttggtggtaagcaatttccgggcagaacatctgtggggagactacaccacagctactgatgcctacctaaaggtcttctttggtggccaggagttcaggaccggtgtcgtgtggaacaataacaatccccggtggactgacaagatggactttgagaatgtgctcctgtccacagggggacccctcagggtgcaggtctgggatgccgactacggctgggatgatgaccttcttggttcttgtgacaggtctccccactctggtttccatgaggtgacatgtgagctaaaccacggcagggtgaaattctcctaccatgccaagtgtctgccccatctcactggagggacctgcctggagtatgccccccaggggcttctgggagatcctccaggaaaccgcagtggggctgtgtggtaacataataacaacaataacatgcctgagagctgggtgtagtagcacacgcctttaatcccagcatttgggaggcagagacaggtggatatctatgagttcgaggccagcctgggtctacagggtctcaaaaaaaaaaagcaaacaacaaaactggaatgttcaactggcttctccctggggatctgcaatggcttactatgcatagagaggccactagagtggctgagtttttacaatagagcatccctgactttcccttccacactgcctcagccctgcaatgcccgaaagcttggcaactactgccacgaagcgtaaacatgggccaggagccagcggaaggccagacggtctccacccagctttaaatcccttctccc

SEQ ID NO: 76 - DNA, 779 bp, Mus Mus
gaataaggacttccacggctttacagacatggagcgacaaagcgtcaattacaagcttgatgtgggacctgaggaggatgaggaaaatgcgaatggtgtaaagactctgatggtcttgctggctggagagggaagaaacgagggagagagtggacggggcctgcctgggtcgggagcctcagcagcggaaggatacagagcaggagaaataagtgcaggtgggcctgctgcgccagtagccgacctcatggataacagcaaccaagaggaccttggtgccactggctgtgaccaggagaaggagaagcagccagaggagccagtccctgattccatgggagatttggaaaatgtaaagcgtgtgtccgggccgtggtccactgttaatcctgtgagagtgttggtgcccgaattccgccacggttggcaacagagcttcaatgtgctgcaactacaagagctggagagcatcttccagtgcaatcactacatcagcactaaggaggcaaatcgcctggcaagatccatgggagtgagtgaagccacagtgcaggaatggtttttgaagaggagagaaaaatacaggagttataagaggctgtaaatgctcagaggtcctcttcctgcttcccacagcatctctctgtgaaggctatggagaagccccagggatccacgcttcctcaaggcgccatagccagacgatgttttcccgccaaagtcctgttacaacacagttatctcctcaatacttgtattagcaataaagagctgaattc

SEQ ID NO: 77 - DNA, 2215 bp, Mus Mus
acttttgattgagtttggaagcatctcttggcctggattaaagtgctatggagcaacttctgagtcccagcaacgtgagtgcaaaatctcatagttgtctcatctatgacagcctggttgagctgagatgccatttcacatggaagttggttatagaaaaggttgacatgcctgatttggaagtaagaatctcagagactgagttctttgatgccagctacagcatcgggatgcacaacctcctggcctacgtgaggcacctgaaaggccagcaggaggaagccctgcagagcttgaaagaagctgaagccttgatccagagcgagcagttgagcaagagaaggctggtgacctggggcaactgtgcctggctgcattaccacaggggcagcttggcagaagcccaggtctacctggacaaggtggagaaggtgtgcaaggaattttcaagtcccttccaatacaggctggagtgtgctgagatggactgtgaggaaggctgggccttgttgaagtgtggcatacaaaattataaaggagccatggcctgctttgcaaaggctctgaaagtggagccagaaaaccctgagtacaatgctggctatgcagtcgtagcctatcgcctggatcacattgatggcacttcgctccaacatttacagaaggctgtcagcgtaaaaccagaagatccataccttaaagttctccttgccctaaagcttcaggatttacacaaactagaagaagcagaaaaacacattgaagaaactctgcccaggatatcctcgcagccctatgtctttggatatgtagccaaattttaccgaaggaaaggattggtgaaagaagctcttgagttccttggcagagccttgcagaaacaaccttgctccaccttcttgcatttccagattggcctttgccataagaaacgactgattcaaataaagaaagcttcaaacatgcaaccaagaggggaagatagaaaaagagcagaccaatccatccatttggctatatgtcattttaaacggactttagaactgaaacccacatatgtgatggcatatgttactctggctgaaatgtacattgagaaaaatcaactaaaagaagcagaggacaattttcagaaattgttgaacatgagtaacttggaagatcatattcagcaagagattcacttccggtatggcaacttccaacaatactataagaaatcagaagaggcagccatcacacattacttaaaaggcctaaaaatagaggtaacttctcactacagggataaacctctcaaggctttggagaaactggctaaaagacgcaaggaagatcatgtcctggaaaacttgggcctacttgggtttgtctacaaactgaaagggaacacaagtgaagccatgtcatgctatgagagggccctgaggctcacaggagcagtgaaccctgagttttgaggaagagcttcttgagtggcttgttaagcgtgagcatgactttctaatctactagtcttttccagctgttgccttaactatataaacccccatgaagcaagatacagatgatgccttttctattgcttgcttttctacagccataatttatggttgagggcctatgagtgtgtgacaggagtgtccattctcctgtcacacatgctggacattttccttatgagtgtgcctttaattgcatctcctataccatcagtcttcaagaaccccgatcaaaggacacttgacacattaaggctcatttttcatgggatcttccaaacttcaacaacatctgacagcaaaataaatgagcaatggtgagcattaaaagggagagaaatgcaagatatctttacagtgtttcagtccataggcccattttcataggctttactgcagccagaacctgctggtcaatgacccccaagccaataatcaaagcatctttttgtataaaagtgtttgattttagataattgtggtggatttctgtggtctacatatattggcctttattcattactaagaaagatttaatgcttcaggaagatagaataaagcagtaacctctgtggaatgtgccaacaacaacaaaaacaacaaaaaatgacaaaatttctactggagaatgttcagactatgaagtgttgtgtaatatcaccttgttgctttcctaacccaatcatattcaataaaatctgctaatatcacag

SEQ ID NO: 78 - DNA, 2687 bp, Mus Mus
ctgagcagctgagcagtgactctacccagtgtcagctttccatctctctctctgaaaacactttattttctcagaatttcaggagattacaaaatcctctgtatcaccttctgagagatttactgtttacttttttatcttcacacacacacacacatacacacacacacacacacactcacttgctcacttgctcattcactcactgcttcctgccctgcaaaactggataccactgaagaattttctgaagagacttgcctttcatcctctgaaccctgtctgccagacaatgctgttgaaaaaagcttatccatgactggagagatggtgaattactgcaagcaaattgttcttctctctggattagaatatatgaatgactataactttagagcacttaagtccttactgaaccatgacctaaaactgactaagaacatgcaagatgattatgacagaattaacattgctgacttaatggaagaaaagttcccagaggatgctggattgagcaaactgatagaagtatgtgaagacattccagaacttgcagctcgtgttgatatacttagaaaagagatggagaaagttaaaaataaaaccaaaataaaatcagaatccagccctcctccacttacctccagcctgatggaagcttgggaagtagaaccagctatggtgacagcttcatcagaggtacaccgtctaagatctcactgaaaaggcatccactaagctcgttctctccaggactttcctctgagtacttagtctacgcccctcatgtgtgccaaggacctagctgaaacaaaatgaagggtgaacatattcataataactgatcactcattttgttttaaaactaaagaacctatgtttacttcattataatataattttctgcaacaaatatataaaatcattactagctttgtgagtgtctgtgtgtgtatgtgcgtgatttatatacatgtgtgtgcatgatatcactgatgtcaaaggaggacttcaaatactctgcttaatcagtctctgccttactcctttaagatacagtctctctctgaacctggagctgtgctggtaggcagcaagcctcagagaccatcccgtctatgcctttcacgagtctcaggtcacatacagaaagcccagatttttatgaggatactgggatctgatcataggtcctcatgtatgtgcagcaaatactcttctcccataagtcacctctcaaatccctcattcttccttttgagaacatttgcaaaagtagcattcagtttaaggacatgaccttccaaagcctgttaaaggacgttaaactcctttttgagaacattcttccttttgagaacatttccaaacgtagcagccagtttaaggatatggcctttcacagcctgtaaaaggacattaaactcaacttgtactttctaaatgtaggtgttctcccaccaaggacatgtgcatagagtagtgatgtgcatgaagtgtttctgttcctggacaagaggatcctatgctcttgtatggtcaaagtgcagttcccaaggaattaatagactcagaatccactaacatggaattatttatattgggattaaaataattgttctgtatacaattttaaaacacatgacaagaactgaggataaaaccccatagtggaacctaacttggcacacaaaagatcccaagttcaacctctaatacacaaaagagaagatgagccattagaagtagaaaatgtctgcattttttcctttgaaaaaaggggaaataaactacaaacccctgaagcctgcacaattccatcatgtgactaaatcaaccatcacattatcaaatgcttccatgaagacctcagtgagaagcttttgttcttgacagggatatgttattaagaaacaatttatggtcttaacaggctacagacagtagtttcatttcactaggactatcacataatttgatcatttaaaacactttacctgtacatacatttaaaagagttatgattgggcttcctttatacttggcaagtgttctacctaccaggtgagctacaatttgattggcagaaatattgactctattcattctagatactccagacttcttcacaatgataaaaatcttgaagcagcttatcatccaatctcccactaacttatttatttaatgtagccattcattcttttatagtgtactttgcgaaactctgaaaatcacttacatatgtttactttattgaattctatcataccaggaatctgtctatatgaccaatgttttgtcattttaattattacagttgttttactttgaatataaaatcaatgtgcacatctaattatctgtcttcataagtaatgataatataattaaaacatacctaaacctgaagaaaaagctataaataatcagttttgtttggatgacatcaactcttttatttcatttttctttgtttttgtttgtttgagcaacgactttttaatgaccatattttacaattacactggcaaatcatgcattggatgtgattctggtcagcaaatctgcacagtcctttgcaactggacctgtgaaagcaaagcacttcatctctcctattgtttactatgcctactacattatcttcagaataaacaaaaccctgtcttttcactggaaaaaaa

SEQ ID NO: 79 - DNA, 1217 bp, Mus Mus
tggcaggctgcggctcgggcctccaggcagctccgttggctgcttgaagtgcaagatccgactgcagtgtgggaccactgtgcctcggcctccccaggcggagggaggacccagacaatggctgttgctcacgagatggagatggagagtgtgaatctgaacatggagagagagggaaaggaagaaccggaggaggagaaaatgaaagggaatggagaaggtaaagacttccccaggagcagaaaggtccacaggatcgtctccaagtggatgcttcctgagccagtccgaagaacatacttagagagagccaactgcctcccgccgcccctgttcatcatcctcatcagtctggctgagctggctgtgtttatttattatgcggtgtggaagccacagaagcagtggatcaccctggacacggggatcttggaaagtcccttgacgtactgccctgagaagagggaggaagcctggaggtttatctcatacatgctggtccatgccggagtccagcacatcgtggggaatcttcttatgcagatcgtcctgggtattcctttggaaatggtccacaaaggcctccgagtggggctggtgtacctggcaggagtgcttgcaggttccctggccagctccatctttgaccccctcaagtctcttgtgggagcttcaggaggagtctatgcattgatgggaggatattttatgaatgttatagtgaactttcgagaaatgattcctgcctttggaatcgtcagactactcgttatcattctgatagttgcgtcagacatgggatttgctctctacagaagattctttgtccctgcaaatgggtctccggtgtcctttgctgctcacattgcaggtggatttgctgggatgtccataggttacactgtgttcagctgctttgacaagaccctgctcaaagaccccaggttctggatcgcaattgctgcatatgtagcttgtctcttatttgctgtgttttttaacatctttctgtccccagcaaactgacttgcctctatgataaaccagttaatataaaagtgtcacatgggaccaggtgtggtggcacacgcctttaatcccagcactcgggaggcagaggcaggcggatttctgagcttgaggccagcctggtctacaaagtgagttccaggtcagccagggctacacagaaaaaccctgtctcaaaaccccccccc

SEQ ID NO: 80 - DNA, 672 bp, Mus Mus
atataagggccgctcgcttctgggcgttaacatctcctggccgcagccgccctagatttggaattctacactaaagtcatcatgggcgttttccagatattgatgaagaataaggaactcattcctttggcgttttttataagcgtggccgccaccggggccacatctttcgctttgtatgcgttgaaaaaaaccgacgtggttattgatcggaaaagaaacccagagccttgggaaatggtggatcctactcaaccccaaaagcttataaccatcaaccagcaatggaagcccgttgaggagctgcaaaaagtccggagggcaaccagatgattgctcaccactcctctcttccaaagaacactctatgaatctagtggaaacatttctgcacaaactagatgttgatgccagtgtgcggaaatgcttctgctacatttgtagggtttgcctgcattctttggatcctgcattagcaagtgaaggtagcacatagtctaaaatagttttctgtgtttattggtgtaaatttcaattttacagttgaaattttatgtttgtgatgcttggatattttccttgaaatgtataaacatgtaaaaattagattactgcctgtaataaaataattcgatgactagcaaaaaaaaaaaaaaaaaaaaaaaaaaaaaa

SEQ ID NO: 81 - DNA, 907 bp, Mus Mus
agggtggtggcccaggatgcctggagggctgttggttcttgactgacagcctggctctcccccaccccccacctccccatcctccagggctttctgagggtcgccaaggagcatggcaggcatcccagaggtggtggccatggactgtgagatggtggggcttgggcctcaaagggtgagtggcctcgcccgctgcagcattgtgaacatccatggcgcagtcctgtatgacaagtacatccgacccgagggagagatcacggactacagaacccaagtcagcggggtcacgcctcagcacatggtgagggccacgccatttggtgaagccaggctagagatcctgcagcttctgaaaggcaagctggtggtgggccatgacctgaagcacgacttcaatgccctgaaggaggatatgagcaagtacaccatctatgacacgtccacagacaggctgctgtggcatgaggccaagctgcagtactacagccgagtgtccctgaggctgctgtgtaagcgcctgctacacaagaacatccagaacaactggcggggccactgctctgtggaagatgccagggccacaatggagctctacaaaatctctcagcgactcagagcccagcgagggctgccttgccctgggacgtcagactgaacttcatcctcatccagggttagaagctgccactcctcaagttctccatgaatgagacctgtttctaacaaccactgccaccaaccaccgcaatgtgtaaaaccaagaacactcccccattacagcaactctcttgctttgaggcaaaaacaacaacaacaacaacaacaacaacaacagcaaaaccaaaaaaaaaaaaaaactttagtaataaatggctttgattttgtctaaaaaaaaaaaaaaaaa

SEQ ID NO: 82 - DNA, 1551 bp, Mus Mus
atggatgtgttccccatgacaccaccacacattttggtgagagttggcttgcagagcagtggaaaacccagaagtttgttcattcctgaagtgaatccagattcctgtgtctctgtgattatcctcttttcaggtccttgtgttgaccatggaggctttggccatggcaaaagatttcctggtgcagaacatctaaaaacccgaagtcctctgagtgggcagtcaaactccctgagagtgaaggtgtggcggctgaagatcgcaatgtccaataagaattatggacatccagttttgttggtgccttcctgttatttggtaaatacaccaagtacggagaatttgatgtatgctggctctcaagaacaagctaataaaattgggacaaaccttggtaaaaatctaagcataagtgagaaaaatgtagacaacatgttggtgaggaaatccgaagtaggaggttatctgagcagggaaagcactttaagtgtattagatgacaaatacatggtagacgtcagggatgcttgtccacacccatcagtcctccagggacgaacacatacccctgtgctccttgtcaacagtggctccggcatatgcaaagccatctttgtggtcaatgacactcctggagccatctttccctacatcgtaggccacctagggcaccagggtgtgatggtgggcatgggctagaatgactctgagaaaataatccagaccctgaagtaatccaaccaataggacattgtcaccaactgggacaataacggagaatatctggtactacatcttctataatgagcggggtgtggccctcaaggagcatcccagtgctgttcactgaggcccctctgagtaccaaggcaaactgtgaaaagatgacccaaatcgtgtttgagaccttcaaacaccccagcaatattcgtagacatccaggccatgctgtccctgtgtgcctctagttgagccaccaacattttgatggactctggagatggtgttatccttactatgcccatttatgaagattgtgcttctccccatgtcatcctgcgtctggacctgacagactacctcgtgaagatcctgactgagcagggctatggtttcaacactataaagcagggaatcatacatgatatcaaggagaggttgtgctatgttgccctgaactttcaactagagaaggccactgctgaatccctttcctccctagagaagcgctgtttgctgccagacagccacgtcatcattattgacaataagcagttacagggccctaatgccctcttccagctttccttcctcagtatggaatcccgaagaatcctcgaaatggcagttgattctagtgttaaatgtgatgttgacatccacaaaggcctctatgttaacacagtgctgtctggtggcactgccacgtgcccagacattgttaacaggacacaggcgatctctactctggctcccagcatgatggagatcaagatcatcatcatcatcatcatcatcatcaccatcatcatcatcatcaagtcttcctga

SEQ ID NO: 83 - DNA, 2110 bp, Mus Mus
atcactggaagcaggcgtgggttagtgtccttatccgaggcagcctggaggacagctggctaagaggtacggagaagtcaaacttgggataccgggagagggagagatgaaaacaacttctcaatttctctgcggctgacagaagctcctgagagaggctttcagaacttgattccagctggcccgtgaaagctgtgtctggacgggagagcctcagaggaataaacagtgccttctctggcttctccgggtcatgaccagtctgttcagaaggaagtggtgtttctctgaccccactgttcccacagccccctggatggtagatcatggggctgcacccttccccacccttgggaactcagtcaaacggttatctttatctcgccagcttgtcctcgtgcttgaccagcgcagtttcacttttgcaaacatctgtttatatcccttgagagaaaaaatatcaagcaacctgcctcaaacgacgctgttttgtccggtgagcaaggacagcctccgatggataactacacagtggccccggacgatgaatatgatgtcctaatcttagacgactacctggacaacagtgggccggaccaagttccggcccccgagttcctctccccccagcaggtgctgcagttctgctgcgcggtgtttgcggtgggtctcttggacaacgtgctggcggtgtttatcttggtgaaatacaaaggactcaagaatctggggaacatctacttcctaaacctggcactttcaaacctgtgtttcctgcttcccctgccgttctgggcccatactgcagcacacggggaaagccctggcaatgggacctgtaaagttcttgtcggactccactcctcgggcttatacagcgaggtgttttccaacatcctcctccttgtgcaaggatacagggtgttttcccaagggcgactggcctccatcttcacgacagtgtcttgtggtattgttgcgtgcatcctggcatgggccatggctactgcgctctctttgcccgagtctgtgttttatgagcctcggatggaaagacagaaacacaagtgtgcctttggcaaacctcacttcttgccaatcgaagcgccgctctggaagtacgttctgacgtcaaaaatgatcatcttggtacttgcttttcctctgctggtttttataatctgctgcaggcaactgaggagaaggcagagcttcagggagagacagtacgacctccacaagccggctcttgtcataacgggcgtgttccttttgatgtgggcgccttacaacactgtgcttttcctgtctgctttccaggaacacttgtccctgcaggatgagaagagcagctaccacctggacgcaagtgttcaggtcacacagctggtagcgaccacccactgctgcgtcaacccgctgctctatttgcttcttgaccggaaggcctttatgagataccttcgcagcctgttcccacggtgcaatgatatcccctatcaaagtagtggaggctatcagcaagcgcctccaagggaaggtcatggcaggcccattgaactgtacagcaatttgcatcaaaggcaggatataatataatataaacactcaaccttgtctcttcacattgttttatgccatttttatatgtttgtataaaaatagaatataagaggaaagggggctggttaatgaacatttactactaagcgttgaatttgtctctggcacacggttaagttatttataaaggtgaattccactcttcctctttagcgtttgtccgcagtgtgggcgtgggcggtgtgcattccataaactgaagctcggtagttgtccaaagttacataactataaagtggcaaaactgatgtgtaaactcagagatcactggccccagagtctgtgagttatccaagcgtgccagcttttcagtaactgtcagctagcagtggtggcatgtctgtcatcccagcactctaggaggcggaggcaggaggcatctcacaaatgcaagtataacctgacttcccccaacctcaattcttttttttttgttgttgttgttgttcatcaaaatacatgcaataaatatatatatttttaaagc

SEQ ID NO: 84 - DNA, 3022 bp, Mus Mus
tctgtggctcgggcgtctgtcgcggaggctgtgcgggcgacaccaggcctgcatggggaccatggctcggccgcggcgcttcactgtggagctgccagattgctccctgactcacttcgtcctgggggatgcaacagaccacagggatgcacgcctggcagagctgctcggccccccagggcgcagctacgcgcctgtgtgtgcccctggctccaggcgaaggctgcgggccccgggtgcaggcggcccgggtgcaccatcgcctgctgcagcagctgcgccggggtcctttacagagatgccaactgagcaagcttctgggctatggtccgggcgatcaggccggcgaagcccagcatggcttcctgctgcgggacccttgcgaccacccggacactcggcgcgacttgctccagcttctgggctcctgccaggaggcggcgcgcccgcagttggccgagttccaggccgactcccagggtttgctgtggcagcgtctgtgggagttgcagggagacaggcaggtgcaggtggactgcgcatgcgtcctgccggcacaggaacctcatctgcacccattgctgccagatctgcttaactctgcggtgttccaagaccgggacgcggcaagggctgtcttggaagagtgcacatcctttattccagaagcccgggcagtacttgacctagttgaccagtgcccaaaggaggtccagaaagggaagttccaggtcattgccattgaaggactggatgccactggtaagaccacactgacgcagtcagtgtcagagtctctcaaggctgtcctcctacagtcgccacccccctgtatcagccagtggaggaagatctttgatgatgaacctactatcattcgaagagccttttattctttgggcaattatctcgtggcttctgaaatagctaaagaatcaaccaactttcctgttattgtagacaggtactggcatagcacagccacctacgccatagctactgaggtgagtggaggcctacagtacctaccccctgcccaccaccctgtgtaccagtggccaggggacctgctgaagcccgacttggtcctgctgctgactgtgaattctgaggagagagtgcggagactgcagggccggggtcaggagaaaactaaagaagaggctgaacttgaggccaataatgtgtttcgtcagaaggtggaaatgacgtaccagcgtatggagaacccaagctgccatctggtggatgccagcccctcgagagagacagtcctgcagaaggttttagagctgatccagagttctggtcgttaattgtagttgttctggccatgttcctcattacaccggagaagctgtgtgatgccccgaaacccatcacttgccatgcagcttcttagatttagggggtatgagcatatttggtggaaaaaaaaaactggggactgagcagtttgctttccttctgactgactgagccagctgcggctgctgattcatttctgcctggccatgtaccaacttcttgggatatattttaacaccccgactttctgatccagtggtgagcctgctggaggactttctgcagctggaagctaaggatgtcagttttggcccacactgatcaattgtgatgagctagcatcatttgtttttaccccaaacccgataactaaggactatcacagagcctggctatccgaggacattcctttggagctattcatgggtggagacacttggaaagaagccattgctcttaattcagaggatcaaagaacaccttggacagtgccctgagtgagtgccttggcactgatagatgtgtgcccctgaactgcaagcgctgcaaacccctcttgttctcttttgcgtgtctgtatctgtattccgtttctcagctctgcaatcccgttctaagtgtaacgagcaggctgtgctgatcgggatgcgctgcacaccaatttgtttctgttgatgtttacatcatgcgtttcctcggtgtaggagctgtgtgtgagtcactcacacaaacggaggccaaggagctaaatgcagcgtttgctcaatgttttcaccacacaaatttaatttatcttaataagcaccgtggattctggaacgagacttcgtagtaaattatcatgcactttgaatgtcttctgattgcatgtgaagtcagcttcgagggctcttgagatagagaatagagctgtggaggagaagcctggtggctctgtagccttggcttagtcatttaacgttgataatgtcaacagtttgatctgaaagggggcagttggtggtcctctagaaatatttacttgggaggccaagaaaggagaattgaaagctctaggtttaagtttagaactagcctgggcagtggagtaagaccttgtctcaggataaaaactacaaagaggactaggggtgaaactccatagtagaacatggtattgaatattctatccttgggttcagaatctggggtccatccccagtaccataagaataaaaatataaacagaaaaacaaacaagtaaacaataaaaggaattaagtcatatttggtcacaagaaggtggctggaccagactattatttaacattccagttcaaatgttgatgcctctctacatcatttttgatcccacatcccatttcttaagaagaatctgttcccaagtaactatattaaattacatgaaagccttctaaggtttaccctaatcttaaactataataagatttaatattaacatctcaatatttttcaccttgggactatgtataacttataaataatgtgtccatgtatataaatatattcttggcttctgttaaacatatttttaagctgataaataacattaaggctctctgtaatgtggcagctaattccacaaagggttttgttcaagcctctctgagatgattgcaccagaggctgaataggaagtcgtagtgctttcttcatgaaacctgacagtgaataaacttgctctgacattccc

SEQ ID NO: 85 - DNA, 2400 bp, Mus Mus
ccacgcgtccgatctcatctccggagcttttccccatttcccttcccagcgccctacgcctcctgtacagcaggttccttggttttaattgcccctgctctctcttgcctgctgctcctccagctgtccggcactctgttttctccggctttatccacctgtgcgtctctcgattgcccctccaggtgcgcaccccgtagccagaactccgctaggtgtgcctgtgccttgagctcttgggaaagcaagatcaaatagttggagaaacttcagccgctaggtttgcggtgagcatcgcatccacacccgtgaggggctgggccaggtgactgctctttgagcgatgggctgctccagcagcgccctcaacaaagcgggcgacagcagcaggttcggcagcggagtaacttcgaatgagaattcttccactgtagaacataacaagttctgtgtagaccaacctaaaccatgtacaccaggaggagaagctgcctttcatggcaacacacaaagggaaagccatccttcactcgagaggcccaaggcttcagtggtgcctacagcaaatggtgttaaatcctaccatcaaccatctctggcaaatgatgagacccctggaaaggaagccacagatcactcaagacccacaaagaagattgagcctctagtgcaaggcggggagtgtgagcaacctcagccaggaggcaaagatgatatgttgggaactgaggaagtgaagaaagatgtggaagcaaggacagaggtcccgtctttaaaaggagatgctgagattaagcctctgaggctgtcatcagagagggactcccctggagctccacaggctgggacgatgaagtttctacaaacagccgagaacattctgcctctggaaacaactcaggagctaccaccaaaagaagcaacgggaaagggtgcacagccccagattctagaagcaattcccaaagagaacagctctccagaaatagaagggatccaatctgcagaaagcagcggacagcagcaacttgtagaagccccaggtgaagctgagcagccccaagctctagaaacagtactcaaagagaacgaaacatcacagatgccaggcagaagccagcccgtgccaacacctgtaatgaacaagtcaccctgtgaagctcctgacggtctcagaaatgcccatgaacctcaagtaacaggtggaaacagggtacagccagccgaaactggagagacagcagcaaaggtggaaatggccagagaaatccaccctgataaagaggaacaacacattgaaggtgagacaggagaaaaggtggaagcagagatgaaaaatgagaaagaaagtgaagaagctgaaactaaagagaaagaaacaggagaagctgtggatcttggagcagcaggggctggtgacagaagggcttagtgtgcagtgttacaccagagggcagggatatttgaggctgggagggcgggcaccacctttctgcggctttgtggtttatacaaggagtatagttttaaaatgactgtaggaaccaagagaacaatgctgtttttgtttgtttgtttgtttgttttcttttattgtttacaccataaaactgctaagccagacacggttttcttagatacttaggataattatgaattcaaagtgacaatagccatagccaatcaaaactgtaagatcatctaagagaaagaaggcaatcttcacccttgtagccatgaggtctcaggataaaatgagaccctaaaaggaaagtacaaacctttaaatgtaggtgtctagagagaggaactagcaaactttaaggaactcatgataagagagttttgcagttataatagtgatggaacaaaattaaataaccccagaacacaggaccaactctacctaatatttctgtcctgtaatagaaatttgactgagccgggcgtggtggcgcacgcctttagtcccagcactcgggaggcagaggcaggaggatttctgagttcgaggacagccagatctgcaaagtgagttccaggacagccagggctacacagagaaaccctgtcttgaaaaacaaaacagaaagaaaggaacctcagggagcctgtattctaactactttctgtcctgaaatctatctactactacaaatcactgtgacccatggcatactaaatgttaacaaaaatttctggagggatgcaattggggtgctgttgcaagctttgggattttttacagttaaagagtccacattttccatgtgccattttgaattggctggtgattttatacttaaggggggggagtgttggtgatctctctctctttctttctctttcatgtgatttactagcagtaaaataattttaaatcaaaaaaaaaaaaaaaaa

SEQ ID NO: 86 - DNA, 1613 bp, Mus Mus
ggtgtcttcatttataccccatttttcactttctcagttactgaattatctgcctacctactcaaaccaagcaggccacttctgttgttgaagatctcagcacctgtacattgctgccgaaattccagggagtataaccaacaacttgaaagatggagaatgaatataagagacttgttctgctggaaggacttgaatgtatcaataagcatcaattcaatttatttaagtcattgatggtcaaagatttaaatctggaagaagacaaccaagagaaatataccacgtttcagattgctaacatgatggtaaagaaatttccagctgatgctggattggacagactgatcaacttttgtgaacgtgtaccaactcttaaaaaacgtgctgaaattcttaaaaaagagagatcagaagtaacagaagaaacatcactggaaataaataggcaagaagcaagtcctgcaacacctacatcaactacaagccacatgttagcatctgaaagaggcaagacttccacaacccaggaagagacttccacagcccagaaaaggaaaggtatgagtgaagaaaagactgacgtgaagaagatcaaggcatctgggaaagcagatcagcctccctgttgtgaaggacccacagccacatgccagtcaccaatatcccaggtctcatcttcggcttcatctaacattccttcggctaagaaccaaaaatcacaaccccagaaccagaacattcccagaggtgctgttctccactcagagcccctgacagtgatggtgctcactgcaacagacccgtttgaatatgaatcaccagaacatgaagtaaagaacatgtttcatgctacagtggctacagtgagccagtatttccatgtgaaagttttcaacatcgatttgaaagagaagttcacaaaaaataattttatcaccatatccaattactttgagagcaaaggcatcctggagatcaatgagacttcctctgtgttagaggctgctcctaaacaaatgattgaagtgcccaactgtattaccagaaatgcaaatgccagtcctaagatctgtgatattcaaaagggtacttctggaacagtgttctatggagtgtttacattacacaagaaaaaagtgaaaacacagaacacaagctatgaaataaaagatggttcaggaagcatagaagtggtggggagtggacaatggcacaacatcaactgtaaggaaggagataagctccacctcttctgctttcacctgaaaagagaaagaggacaaccaaagttagtgtgtggagaccacagtttcgtcaaggtcaccaaggctgggaaaaaaaaagaagcatcaactgtccagtgaagcacaaaaaatgaagaagaaaatgattacccaaaagttggaattaaggtagagatgccaaaatagaaatgtcacctctaaatgacagctttagtagtatatccaaccattgattaatcttcatacctgatttctgattttgtgttttcatttgaaaaaaattcttattgttctgtttttctatgaaaataaaatttgatttcatttctctactgtaaaaataataaacatgtctttttaaaggga

SEQ ID NO: 87 - DNA, 1681 bp, Mus Mus
agggtgactggaagcccttccaagcgaggccacgtcctagggaccctgaatcgaaggtccgaacccattgtcgccctctgccctatccctgcccttctcaagcgctcttgtgaccaagactgagcaccatgcagcccgcgggtcttgagggtccacgcgcgctcggcctgcggcctctggggcaccggctgtccctgctgggggtgttacttctagttccgtctctgtgggtaacctgcaccctgactactccgagcccctccagtgctccgacaacaccggaagcctccaatgccacgaccgctccaggcattcctaatgacacggccacgtcaggtgtgaccagtgaccctcgccttcgagagcaagcactggctctgatgcgagacttcccacttgtggatggccacaacgacctgcctctgctcttgagagaacttttccagaaccagctgcaggatgtgaatctgcgcaatttcacccgtggccagaccaacctggataggctcagggacggccttgtgggtgcccagttctggtcagcctacatcccgtgccaaacccaggaccgggatgccgtacgcctagccctggagcagattgatctcattcgtcgcatgtgctctgcttaccctgagctggagctggtgacctcagctgatggtctgaataacactcagaagctggcctgcctcattggtgtagagggtggtcactcactggacaccagcctcgctgtgttgcgcagtttctatgagctaggagtgcgctacctgactcttaccttcacctgcagcacaccgtgggcagaaagcgccacaaaattcagacaccatttctacaccaacattagtgggttgacaagctttggtgagaaagtagtggaagaaatgaaccgtctgggcatgatgatagacttgtcccacgcctcggacaccttagtgaagcagaccctggaggtgtctcaggctcctgtgatcttctcacactcggcggctagatcggtgtgtgacaatttgctgaatattcctgatgacatattgcaacttctgaagaagaacggtggcatcgtgatggtgacactatccatgggggtgctacagtgcagtctgtttgctaacgtgtccactgtagcagatcattttgaccacatcaggacagtcattggatctgagttcattgggatcggtggaagctatgacgggtctggaaggttccctcagggactggaggatgtatctacatacccagtgctgatagaggagttgctgagtcgcggttgggatgaacgagagcttcaaggtgtccttcgaggaaacctgcttcgggtcttcagacaagtggaacaggtgagagagaaaagccttgggcagagccctgtggaggtcaagtttccagagaggcagcagagcaacacctgccactcccacctgctgcctcagcctcaggaggaccaacaccaggatacacacctgaaggtgacaaagctgccaaacatcctccagagagcctcaaaagcccctccccaccccttgccaggcctcatggctacgctcacctccctagccctcatcctttggctatgttgctctggccacagggcagtttagcaaaacccacaaagttcccctcctcattgctgagaccccagcttatgttgagaataaatacctgaaacatc

SEQ ID NO: 88 - DNA, 1533 bp, Mus Mus
cttccaagtgttgaagaagaatcatttccgcggttgaatccttttcagacttgagcatttaaacctaactttaattagggaaagaaacatgcgcacacagcaattgtggttatttctcaatctgtattcacgccctgttggaaaggaactaacaatatgctttcagtttcagtagctctgcggtgtagaaaagaaacgccatggctgacaagatcctgagggcaaagaggaagcaatttatcaactcagtgagtatagggacaataaatggattgttggatgaacttttagagaagagagtgctgaatcaggaagaaatggataaaataaaacttgcaaacattactgctatggacaaggcacgggacctatgtgatcatgtctctaaaaaagggccccaggcaagccaaatctttatcacttacatttgtaatgaagactgctacctggcaggaattctggagcttcaatcagctccatcagctgaaacatttgttgctacagaagattctaaaggaggacatccttcatcctcagaaacaaaggaagaacagaacaaagaagatggcacatttccaggactgactgggaccctcaagttttgccctttagaaaaagcccagaagttatggaaagaaaatccttcagagatttatccaataatgaatacaaccactcgtacacgtcttgccctcattatctgcaacacagagtttcaacatctttctccgagggttggagctcaagttgacctcagagaaatgaagttgctgctggaggatctggggtataccgtgaaagtgaaagaaaatctcacagctctggagatggtgaaagaggtgaaagaatttgctgcctgcccagagcacaagacttctgacagtactttccttgtattcatgtctcatggtatccaggagggaatatgtgggaccacatactctaatgaagtttcagatattttaaaggttgacacaatctttcagatgatgaacactttgaagtgcccaagcttgaaagacaagcccaaggtgatcattattcaggcatgccgtggagagaaacaaggagtggtgttgttaaaagattcagtaagagactctgaagaggatttcttaacggatgcaatttttgaagatgatggcattaagaaggcccatatagagaaagattttattgctttctgctcttcaacaccagataatgtgtcttggagacatcctgtcaggggctcacttttcattgagtcactcatcaaacacatgaaagaatatgcctggtcttgtgacttggaggacattttcagaaaggttcgattttcatttgaacaaccagaatttaggctacagatgcccactgctgatagggtgaccctgacaaaacgtttctacctcttcccgggacattaaacgaagaatccagttcattcttatgtacctatgctgagaatcgtgccaataagaagccaatacttccttagatgatgcaataaatattaaaataaaacaaaacaaaaaaaaaaaaaaaaaaaaa

SEQ ID NO: 89 - DNA, 2988 bp, Mus Mus
gagagtttaagaatagagagctttcaggagaaatcggggcgggcgcagcagcaagcctaaaggtgctgaatccaggtagcagagaatccggtgcaggctgactttttggggtttgcaggttaccatggcatctggtcccaacatggaggctcctgtgtgcctagtggaaaatgagaatgaagaactgagggtgaactccaaagcaataaacattcttgagaggatcactcagcctgtagtggtggtggccattgtaggactataccgtacgggaaaatcctacttgatgaaccgcttggcaggacagaaccatggcttcaatctgggcaccacagttaggtctgaaactaagggcatctggatgtggtgtgtgcctcaccccagcaagcccaagttcacactcgtgcttctggacacggagggcttaggagatgtggaaaagggtgaccctaagaatgactcgtggatcttcgccctggctgtgcttctgagcagcacctttgtctacaacagcatgagcaccatcaaccaccaggccctggagcagctgcactatgtcacagaactgacagagcggatcagggcaaagtccacttcacggtctgaagaagtggatgactctgatgagtttgtaagtttctttccagattttatctggactgttcgagatttcgttctggagctgaagttagagggacgtgtcatcacagcagacgagtacctagaaaatgccctgaagctgatcccaggcatgagtatcaaagcccagaaagctaacttgcctagggaatgcatcaggcacttctttccaagacggaagtgctttgtctttgatcgacctacaaaagacaaagaacttttagtgcatgttgaggaaatgccagaggaccagttggatcacagtttccaagtgcagtcaaaagaattctgttcctacatcttctccaattcgaaggccaagactttgaaagagggaatcgttgtcaatggaaaccgactggcgactctggtgacgacctacgtggatgctatcaatagtggagacgtgccgtgtttagagaacgcagtaacaaccctggcccagcgtgagaactccatagctgtgcagaaggcagctgaccactacagtgagcagatggcccagcgaatgaggctccccacagacacgctccaggagctgctgactgtgcatacagcctgtgagaaggaagccattgctgtcttcatggagcactccttcaaggatgagaatcagcaattccagaagaacttggtggtcaccatagaggaaaaaaaggaagatttcctgcgacagaatgaagcagcgtctctcagtcactgccaggctgagctggacaagctctcagagtccctgagggagagcatctcacgtggagttttctctgttcctgggggtcacaggctctacttagaggccaggaagaaggttgaacaggactatgagcgagtgcccaggaagggagtgaaggcaaatcatgtccttcagagcttcctacagtcacagatttccattgaggactccattatgcagtcagacaaagccctcactgatggccagaaggccatggaagctgagcgagctcagaaggaggcagctgagaaggagcaggagctactaagacagaaacagaaggagctgcagcaggtgatggaagctcaagagagaagctacaaggaaaatgtggcccagctgcacgagaagatggagacagaaaggaagaacatcctgagagagcaagaggtgaagctggaacacaagttgaagattcaaaaagacatgcttaatgagggatttaaaaggaaatgtgaagcaatggatttggagataagtcaactacaaaaagagattcaactaaataaggagaagaatagctcattgggtgcaaaaatccttgatgggtttggagatgtattaatttcagtagtgcctggttctggtaagtactttggtctagggttgaaaatattaagcagccaaatgaatcagacacagaattcagacaaagttagaaaactctaagtatagctttcccccacctccctgagacttacttttgaagtccatctcactttaatttcatttatcaaatttcaaaaaccaagaatataggtcactctctataaattaatggcaagaccccattgctgaaaacaaatgtatacaactcattgattgatggagaactcaagctggtgcccatagatccttctccttatatgcggacatctttggcacagaatgacactctgcatgctaccaaaggaaaaacacaaatgccagcccagccacaagccctttgatctacaatggcatcctgcctgcaaaatatgcaaatgcagtggtggcacaaactgtgggagtaactaaccaatatctgatttgatttaaggccaacttcacgggatgaaacccatgcctacactgcctgggtgatccagaacctagatcagatagcccagcgaaccttgagtaaaaccaaatactattgttgtattaaaaaaaaaaaagtagcaatataatgactcttcctgacattctgcagtactcattaatcagtgccttgctcagccatcatcacagaagcttccccctgccacagatgggaacaaatgcagagaggcccacagccagacactgtacagagagagaatgagagtcttgggaacactcaaccttaagtagggtgtctttatcaaacccctcccctcggggctcaggaacactgtgaaagaggaaacagaaaaactataacagccagagaggacagagggcaccaagaaaaacacccacctcgcgggggctggagagatggctcagaggtcaagagcactggctgctcttctggaggtccctggttcagtttccagaatccacatggcagttcacaaatgtctgtaactgtggtgccaggtgatctgacaccctcatacagacatacatgcaaaacaaaaacaaaaacaaaaagc

SEQ ID NO: 90 - DNA, 2628 bp, Mus Mus
cgggagttggcggctggtgtgagttttttttctaggtcaggtctgtgtggagagagacacagtgcttgattcactgatcttacagaccttcatggataccatgttgaaatccaacccccaaacccagcagaggagtaaccacaatggtcaagagaccagcctttggtcctcaagctttgggatgaagatggaggccatcactccattcctgggaaagtatcgcccctttatgggccgctgctgccagacctgtactcctaagagctgggagtccctcttccacagaagcataatggacctgggcttctgcaacgtgatccttgtgaaggaggagaacaccaggttccggggctggctggttcgcaggctctgctatttcctgtggtccctggagcagcacatacccaccagttttgatgcctcccagaagatcatggaaaacactggggtgcagaacctcctctcggggagggttccgggagcggctggagaaggccaggcgcctgaattagtgaagaaagaggtacagcgtatcctgggccacattcagaccacaccccgccccttcttgctcaggctgttcagctgggcactgctgtggttcctgaaccgcctcttcctgaatgtacaacttcacaagggacagatgaagatggttcagaaggctgtgcaggagggctctccacttgtcttcctttctacacacaagtccctcttggatggattcctgctgccttttgtactgttctcccaaggcctcggtgtggtccgtgtggctttagactcccgcacatgttcccctgctctcagagctctattgaggaaacttgggggacttttcctgcccccagaggtcaacctctccttggacaactcagagggcatccttgcaagggctgtggtccgtgcaactgtggaggagctgcttactagtggtcagcctctgctcatcttcctggaagagccccctgggtccccagggcccaggctttctgccctgggccaggcctggctaggagtggtaatccaggcggtccaggcaggcattatctcagatgccacactggtaccagttgccattgcctatgacctggttccagatgcaccatgtaacatgaaccatgatttggctcccctggggctatggacaggagccttggctgtctttcggagactgtgtaactgctggggctgcaaccgtagagtctgtgttcgggtgcaccttgcccagccattttccctccaggaatacaccatcaatgctagaagttgctgggatagcaggcagaccctggaacacttgttgcagcccattgtgctaggtgaatgtagtgttgttccggacactgagaaggagcaggagtggaccccaccaactggcctcctcctggcccttaaagaggaggaccagctcctggtcagaagactgagccggcatgttctgagtgccagtgtggccagctccgcagtgatgagcacagccatcatggccacactgcttttgctgaagcaccaaaagggtgtggtcctgtcacagctcctgggagaattctcctggctgacagaggagacactgctccgaggttttgatgtgggcttctcagggcagctgcggtgcctggcccaacatacactgagcctattgagggcacatgtggttctgctgcgtgtccaccaaggggacttggtggtggtacctcggcctggcccaggcctcacacacctggcacgcttgagtatggaattgctgccaaccttcctgagtgaggctgtgggtgcctgtgcagtgcgggggttgctggcaggcagagtaccacctgaggggccctgggagctgcagggcatagagctactgagtcagaatgaactgtaccgccagatcctactgctgctgcacctgctacctcaagacctactgctgccccagccctgccagtcttcctactgctactgtcaggaagtgctagaccggctcatccagtgtggactcctagttgctgaggagactccaggctcccggccagcctgtgacacaggaagacagcatctgagtgcaaagctgctgtggaagccgagtggggactttactgacagtgagagtgatgactttgaggagccaggaggccgctgcttcaggcttagccagcaatcccgctgccctgacttcttcctcttcctctgccgcttgctcagtcccatactcaaggccttcgcacaggcggccaccttcctccacttagggcagctgccagattcagaggtggcctactcagagaagttgttccagtttttacaggcctgtgcccaagaagaagggatctttgagtgtgcagacccaaaccttgctatcagtgcagtctggacgttcaaagatctgggggtacttcaggagatgcctagccctacaggaccccagctccacctgtcccctacatttgccacccgggacaatcaggacaagctggaacaatttatccgacagttcatctgcagttagtaccaggtggagcctgatgggacttgtcagcttaaactcaagtgtgtgtctctgctcaggacacagctaacctgaacctgtgtttgctcatcatttggtgtaataaatagactaggttagtttcttcctaa

SEQ ID NO: 91 - DNA, 1295 bp, Mus Mus
tcaggcgtgcttataggagtgcaggcgcccagtcatggcccaagagacagcaccaccgtgtggcccagtctcaaggggtgacagtccaatcatagaaaagatggaaaaaaggacatgtgccctgtgccctgaaggccacgagtggagtcaaatatacttttcaccatcaggaaatatagttgctcatgaaaactgtttgctgtattcatcaggactggtggagtgtgagactcttgatctacgtaatacaattagaaactttgatgtcaaatctgtaaagaaagagatctggagaggaagaagattgaaatgctcattctgtaacaaaggaggcgccaccgtggggtgtgatttatggttctgtaagaagagttaccactatgtctgtgccaaaaaggaccaagcagttcttcaagttgatggaaaccatggaacttacaaattattttgcccagaacattctccagaacaagaagaggccactgaaagtgctgatgacccaagcatgaagaagaagagaggaaaaaacaaacgcctctcatcaggccctcctgcacagccaaaaacgatgaaatgtagtaacgccaaaagacatatgacagaagagcctcatggtcacacagtaatcaagagtaaagcttgtgaatgggaagaaaggcaaaggcagatgaagaagcagcttgaggcacttgcagacttacaacaaaccttgtgctcatttcaagaaaatggggacctggactgctcaagttctacatcaggatccttgctacctcctgaggaccaccaggtcagatgccaggagtctcctgaagtgcaagcaggctcaggagacagcctgtgacagatccacagtgccctcccgctctgacctgctactgctcatccatgctccatacctgactgggtgtttcttgtctcctctcttctcatctcacttgtcctgctttcccctgacagtaaaagctgttcctcaggaaaactggatggggcctccatgttctccaaggatcgaggaagtcttcctgcctaccctgcccaccccagtcaagggcagcaacaccagagctttgctcagccttaaatggaatcttagagctttctcttgcttctgctgctcctgcagatggtctcatcatggtctcctttcagtattaataactccatcagcatagagcaaactcaacactgtgcattgcacactgttaccatgggtttatgctcactatcatatcacattgccaatatttagcacacttaataaatgcttgtcaaaaccaaaaaaaaaaaaaaaa

SEQ ID NO: 92 - DNA, 2055 bp, Mus Mus
atgaaacaagaaaaaatctcccccagttgcctctttgtcaatcagaatgtgggagaagttacagcaaaagaccaaactatggaaggacagaggagactggaacagaaactggatgaaatgactgcattggctgcagagttggaagactgctcaaacataacccgtttcagtgatgtaattaagcttgatgccaatcgctatgtctactactttgcttacctctgggatggcaatccgccagtggtccgtcccaatcctcactatagctacaatgtccaggaactaaggaatgcaattctttcaactgcccagcaggaatctaggggaaggagcttgaaaatcttagatttcaaattcagagttcaagatttgtagaaagcccttgtcagtgaaaacatcagtttcagtttcaggaacacccaagaggtcatagccatgagcaaactggaaaccatgtatagccactggacctgggagctaaggagtcatgtactggacttacagaatcatctggacaatcagattcaaaatgggaaaatcctgacactcacatctaatttgctggagaatccacttggtaagaaatatgaaaccatcaaacatgaatttgacaaatatttcaaagaagacccagatagtgaattattggttcagtggaaagcaaattttgaacacaatctactaatccttaaagacacacttatttcagatgtcagaaggaaatgcaattaacatatcagtctttaaaaaagccaaaaaattcttgatacccaaaaatcacaatatgaaaatcagttgttagagtggagctgacagttagttttaagtgagactggttaggaatcaagtgacaaagaattggaagagaatttcagtctactttgaaaaagtggatctacaatgtgtcttccaatgtccctcatgtcacagagcccagcattgtcttcagattctgaaaatatccttctggaatatttcaagaaggagaaaactattgtgcaaagactaaaaataaagtctcgagaaacttttaaaatcaaatatggcaaacatatccaaatgaaaaaagaacatgttgtatttacaaagagtttaaaacctcatcacaaattatccatggatgtcactactaacaatattctttataaatttactgaaacacttaaaaacatttggaagcaaaagcgtgattacagtcagaattactttcatgaaatcttgaagatcatagaaaatgagctgaaatctgaaccctgtgagggagactacacatttaccaaagactacatcattgacttatccttgtacttattccaaagagcatccaaggatttcaggaaaatgcatgaggcattcaagagtgcaaatgatcctgtgaactatctggagtgaatagagaatagatgattatccagcctagctgaacaacttcgaaaataagatataagataaactgtttgtttcttggtaaatacaaattggtcaacatctaagcatagagaaaagttgctactgtagacttggcttgcttaatctttgttaatcaatgacgaaagaattgtggctttgggattagtatgaaggaaaagatagatgaaagaaagttaggtgagaaatgtttcattagatgtgagtttcaaaagaggaatacacaatcaatactcctgttgtaatttcctgttgtgtgatggcttgattctgtttttgaagaacatgggttttggtgattgtttttagaaaatttgtaacttgtaatcaggtaatcttttacaaacatagagaactttgtcttagatgatgttaaaaggataactgaaaataaagttgttggagctcacactttgcagattgcttcctccaccaaatgtgtgagcatgtgcctgctttatttacatcatcaccaaccccatatcccctcatttgatcattgacatagctagtctttaacatcctagtatcaatttaagttgcattataaatgaaataagtcaaaatacatcagtaactattgtaagacttgaagatcttctattaaaaagattttacttctctctg

SEQ ID NO: 93 - DNA, 1250 bp, Mus Mus
cttctgtccagccactcttccccagagttctcttcttcatcctcccccttgcagagtagggcagcttgcaggtcctcctgcaagtctctcccaattctctgcgcccaaaagacttgcagtgcatctccttacgcgctgcagggaccttgccagggcaggactgcccccgcccagttgcagagttggacgaagacgggatcctgctgtgtttggaaggctgagttccacatctaacagctcagagaggtcaggaaagaatccaccttgacacatggccctctggctcttcaaagcactgcctcttcatggtccttgctggtgaggtccttaagaacacagaaacccatgtcagcagataaccagcctacaggaggccaagaagagttctggatggatggcagctggaagcccatcgccatagccagctcatcttcaacattgaagctcttacctgggcattaagtaatgaaaattttgaaaccatatatgaggaatacatccatctcgtgctacttgtgtttccttctaaacagtcactttttaactgaggctggcattcatgtcttcattttgggctgtgtcagtgtaggtctccctaaaacagaggccaactggatagatgtaagatatgacctggagaaaattgaaagccttattcaatctattcatattgacaccactttatacactgacagtgactttcatcccagttgcaaagttactgcaatgaactgctttctcctggaattgcaggttattttacatgagtacagtaacatgactcttaatgaaacagtaagaaacgtgctctaccttgcaaacagcactctgtcttctaacaagaatgtagcagaatctggctgcaaggaatgtgaggagctggaggagaaaaccttcacagagtttttgcaaagctttatacgcattgtccaaatgttcatcaacacgtcctgactgcatgcgagcctcttccgtgtttctgttattaaggtacctccacctgctgctcagaggcagcacagctccatgcatttgaaatctgctgggcaaactaagcttcctaacaaggagataatgagccacttggatcacatgaaatcttggaaatgaagagaggaaaagagctcgtctcagacttatttttgcttgcttatttttaatttattgcttcatttgtacatatttgtaatataacagaagatgtggaataaagttgtatggatattttatcaattgaaatttaaaaaaaa

SEQ ID NO: 94 - DNA, 507 bp, Mus Mus
agttgcagcatttgtcacacccagagcccgaccatggagcctccgctgcccacgccgatgctactgctgttgctgctgctgctctccagttccgccgcgctccctgcacctcccaggaccccaagacactcagacggaatgttcaccagcgagctcagccgcttgcaggacagtgccaggctgcagcgcctgctgcagggtctggtggggaagcgcagcgagcaggacacagaaaatatcccagagaacagcctggcccggtccaagcccttagaggaccagctctgcttgctgtggtcgaacactcagaccctacaggactggcttctgcccaggctgtccctggatgggtccctgtctctctggctgcctcctggaccaaggtctgctgttgatcgttcagagtggactgaaacaaccaggccacccagatgagggaggaagagtctctaggaccctggctggagtagggattggttgtccttggcatcaataaaaaaggaattt

SEQ ID NO: 95 - DNA, 1736 bp, Mus Mus
cacccgaggggctcgaggcccaccgactcccggcagggccaagtctcagaagaccccccgccagggcactgctcgctgccagaccctcgagagtgccatgcgatccatgagtgtaaggcttgaatgtcatgacgttgaggaacagtttatattgcgtctgcctccggaacaagcttatgctgtcaggaaaattatacattctagaaatgctgcttggaaggataaactaaaaattgacttttctcctgatggccaccatgcggttgttcaagtagacaacgtctcactgcctgctaaactggttaatctgccttgtgttatcggaagcctgaaaactattgacagaaagacattttataagaccgcggatgtttctcagatgcttgtatgcagtcctgaaggtgagcctcattctcctcctgaagaaccagttgtctctactggtcctactgtaattggaattagtgaagggaaggcagagagaaaaaaatataactggaagcatggcattactccaccacttaagaatgtcagaaagaaaaggttccggaaaacaacaaaaaagctcccagatgtgaaacaagtggatgaaatcaactttagtgagtacactcaatctccaagtgtggaaaaagaagtgaagagactgctctactcagatgctgaagctgtcagtgtccgctgggaagtcgttgatgatgatgatgctaaggaaatagaaagtcaagggtccatgccaaccactccaggaatctcacagatgggtggtgctagtttatcagactatgatgtgtttcgggagatgatgggtgattctggcagcaacagtaatgatgtggaagagaagagtaatgaaggtgacgacgatgatgatgaagatgaagatgatgaagactatggaaatgaaaaggaggaggaagagacagacaattctgaagaggagttagagaaggagctgcaggccaaatttaatgaatttagcctccatgaagcagaccaagattacagttcaataaccatggcaattcagaaactgatttttatcaaagaaaagaggctccagatgatttataaaaaagcccagcgacagaaggaactcctcaggaaagtggaaaacttgaccctcaagagacatttccagaatgttttggggaagcttaacataatggaaaaagagaagtgtgaacagatttatcacctccaggaacaactgaaatgtttcctgaaggagtaaggaaagcctcagcctggcacaccaagtggattcaccctccagatgaagactgggtggaaccacatacttctgtccctctactttatcttaaacaacttttatttgttgagcatttttcactaaagtaaatttaaggatcacatttatataggagacatatatagagggagttatataaatgcataggtttagagacccacatgggatgttgtttctctttgtcaatttgagattaaatgtgtgtatttctttatctcttactctatggtaccatgagatcattcagccgtccttgtcaaaggtttaggctagaaagatacacagctgttttacataagtttacttttcaaacctggttttaagtatttcttacaattttgaaaatgatcaaattgtcagctggcaatcccagcaatttaaaaggcagaagcagaaggtcaaattgaaggccagcctgggctgtatataagaccctgtctcaaaataaaataaactgaaaacc

SEQ ID NO: 96 - DNA, 880 bp, Mus Mus
gagtcgtggccgctcccttcgaggcagcagcgtcctgtgaggcgagtggcgcgttcagctaggcccgagggacgccgcggggggttcagtcagcaacctcgatctcggaaaagccgagcgaagtttccagacggcgccggccggttgcggccggttggtgcgtcggccggcgcgctcaggggggctcagaagtcgcccgagccaaagcgggctttagcaggcgggcctcggaagcggggacgacggacccggtcccaccgcaccccggaacaaacggaaacagtcgctccgaattgccagacactccgcttttgtagcggatcccgcatttccagaaggaaagcgtagaagtcaaaacaacactgcaaacctcctggagaagacaccttcacggacagacaaacggacagacaaaactgaacttgaggttcctcacagtcctcactatttctgagcactcacgatacaactgcctaaactcagggttactgccgtggcagctgctgggatcctggagagagttcttctcaccactgcaatctgtgctttgtatctgcctttgtaaacacgaggaatagtgcaaccctgccatggacagcatgccctgaatagcttcttcctctgtgctcgtcgagaaagaaaaaaaaaaaaggcaactttcaaacctcaagagcatttatggacggaccatggtttcaagcagtttattacctgggctcttatctgcctttctcttctgcaagcaccactgcatagcaactcttctatcagctctcagtgatacactgccttgccctgacataataactaccaactacagaggaccagatttactgggaattagtggaaactaagaaattaaaaatgaattcggtaatat

SEQ ID NO: 97 - DNA, 439 bp, Mus Mus
gacagccaccacacaagtccttagactgcacagcagaacaggaggcatgatggcactcagcactcggacccaggctgcctgtctcctgcttctcctccttgccagcctgagcagcaccacctatctccagcaacagatgagacagactacagagctgcagcctttgcacggggaagaaagcagggcagacattgcgatcccaatgcagaagagaaggaagagagacatcaacttccccatctgcagattctgctgtcagtgctgtaacaaaccctcctgtggtatctgttgtgaagaatagagagcctagagccacatcctgacctctctacacccctgcagcccctcaaccccagtattcattcctgccctctccagcaatgaccttgaaataaagaggatgactttattttcaaactatgatgtctgcattttcaaa

SEQ ID NO: 98 - DNA, 1615 bp, Mus Mus
cagtcatccagggcagcagtggaggtaacattggagagcttgctggagaagggacagggagtgtttccagacagctagagggtacaacggtctcctaaggcctcctgtcccaccagccggccatgatgacctgcccttcagtgcctgctatccctaccctctggctgttcagcatcctgctcctggtggtctccctgaatgctcagaataaaagctgggacaaccctatctgcacggagggcatcctgtctgtgcctcgaggcaatcctgcagtgatgacctgtaacatctctaacaccttcaccgatgtcaccatccagctgtctgccaatggaaaggacaagaccatcttcgataaaaagccccaaggaaacttctcttggcgtgggtgggagctccaagttcaaggggggctggcacagcttgtgatcaaagacacccaggacgaccacacagggatatacttgtggcagctgcatggacgccagagatgctacaaaaacatcaccctgaatatcttagagccttccaacgaggacaaggtcccagacactacgctctttacatccttcccagatcacgcgaagagctctccaatagagggcaagcctgggacccttgtgggagtcatcactgtcatcttcatcttgggagtcgccggattcattacgtttatctactacaggcaccgtcgttcctagaagccccagatggaatgtacctcagtgcctgacttgaggtaaggtggttccaggtctgtggccagtggaagctgaagggagctgcctgcagggttgagtccagagtgagaccaccagcatgggcttatgttctaagccctaggagacctctgggactgcagacaccatggaagtcatcattacgcgcttggcagagcacatggctttgttcagtctgctgggcacaaagtcctttccctgagggcaatggaacccttggctctgtacagatcaggggacagtgattcactgaagaaggaccttggaagctggaaaacaatttaggcatcttttggtcacatgaacaagagtacagcctcctgactatggtcttcagacatctgatccattcctcaactcttccccaaattgggaattcccagccgcacagctcttgacgatcggcataggcttcattatttctgctaaacctctgaggttagggtctcactaccacccaaagagctccagtgtaagcctgatgctgcaccaagatttgcttcaggtacaacttgggggcgtacctgatttctgactcacaacagaaacgagttcgggaagcccagatgtcaggttccaggggccaaaatagggagctaagactttcagatgaatcatctccccactcccacccctgcaaggcagagtgctgtcaggaacaggggtctgtggaaggatgtagtgttggttggcaggcattgctctcctgaggatcatagagcatcttgggattccctgggggcttctcttcagcagactcctgagccccaactccctgattcaacagccactacccactgttcttttctaaacttttgtcctagttacaatgttattttttcttacaattaaaaaatgatttttgtagaaacttc

SEQ ID NO: 99 - DNA, 1830 bp, Mus Mus
ctccggtaccagggtccagcctgtgacagcccatccaggctcggacgctggattaacacctgtgacatcacgtgtgcgctcccgctacatctgtagtcacatctacagccaccttggcagaggaatctacactgagttctgaacctaggtgaccacaagttctcaaacctcatctgtgaccctcaacaccctaatacctgggtcacacttgtgaaactgaaattcctacctgttaccaacacttgtaacgtttaaaacacatttgtgaaacttggtcacactatctgtggctacaacctaaaaccatagaggcacccaaggggccttatttgcaatagctgactgctccagtgactacaaggcatcacagagtagtagcatctactttgattctcccagactgcctgtgtagacggagcaatggctgaagtgaggggggtccagcgagtgctgtttggagactggctattgggggaggtcagcagcggccagtacgaggggctgcagtggctgaacgaggctcgcacagtcttccgcgtaccctggaagcatttcggtcgtagggatctggatgaagaagatgcacagatcttcaaggcctgggctgtggcccgagggaggtggccacctagtggagttaacctgccacccccagaggctgaggctgctgagcgaagagagcgaagaggctggaagaccaacttccgctgtgcactccacagcacagggcgttttatcttgcgccaagacaattcaggggatccagttgatccgcataaggtgtacgaacttagccgggagcttggatctactgtgggcccagccacggaaaatagggaagaagtgagcctcagcaatgctctgcccacacagggtgtgtccccaggatcatttctggcaagagaaaatgctgggctccaaaccccaagccctctgctttctagtgatgccggggacctcttgcttcaggttctgcagtacagccacatactggaatccgagtctggggcagaccccgtcccaccacaggctcctggccaggagcaagaccgtgtttacgaggaaccctatgcagcatggcaggtggaagctgtccccagtcccaggcctcaacagccagctctcaccgagcgcagccttgggttcctggatgtgaccatcatgtacaagggccgcacagtgctacaggcagtggtggggcaccccagatgcgtgttcctgtacagccccatggccccagcagtaagaacttcagagccccagccggtgatctttcccagtcctgctgagctcccagatcagaagcagctgcactacacagagacgcttctccagcatgtgtctcccggccttcagctggagcttcgaggaccgtcactgtgggccctgcgtatgggcaagtgcaaggtgtactgggaggtaggcagccctatgggcactaccggcccctccaccccaccccagctgctggagcgcaaccgccacacccccatcttcgacttcagcactttcttccgagaactggaggagtttcgggctcggaggcggcaagggtcaccacactacaccatctacctgggttttgggcaagacttgtcagcagggaggcccaaggagaagaccctgatcctggtgaagctggagccatgggtatgcaaggcatacctggagggcgtgcagcgtgagggtgtgtcctccctggacagcagcagtctcggcttgtgcttgtctagcaccaacagtctctacgaagacatcgaacacttcctcatggacctgggtcagtggccttgactcagaatcccaactcccaataaatagttcaaaatc

SEQ ID NO: 100 - DNA, 5369 bp, Mus Mus
gagcagacagtcagaccagacaggttgacctctcctggatcctccagccatgcggctcctctgggggctggcttgggtgttcagcttctgtgcctcatccctgcagaagcccaggttgctcctgttttccccttctgtggttaatttggggactcccctgtcagtgggggtacagctcctggatgcccctccaggacaggaggtaaaaggatcagtgttcctcagaaacccaaagggtggttcctgctccccaaagaaggactttaagctgagcttgggagatgactttgtgctgctcagccttgaggtcccactggaagatgtgaggagctgtggcctctttgacctgcgcagagccccctacatccagctggtagctcagtctccgtggctaaggaacacagctttcaaagccacagagactcagggtgtcaacttgctctactcttcccgacgaggccacatctttgtgcagaccgatcagcctatctataatccggggcagcgggttcgttatcgggtctttgcactggatcaaaagatgcgcccatccactgatttcctcaccatcacagtggagaactcccatggcctccgtgtactcaagaaggagatatttacttccacatccatcttccaagatgccttcaccattccagacatctcagagcctgggacctggaagatctcagctaggttctcagatggactggagtccaataggagcacccactttgaagtgaagaagtatgtccttcccaacttcgaggtgaagattactccttggaagccatatatcctgatggtgcccagcaacagtgatgaaatccaattagacatccaggccaggtacatctatgggaagcccgtgcagggcgtggcatacacacggtttgcgctcatggatgagcaagggaagaggactttccttcagggcctagagacccaggccaagttggtggaaggccggacccacatttccatctcaaaggaccagttccaggctgccctggataaaatcaatattggggtcagagacctggaggggctgcgtctctatgctgctacagctgtcattgagtctccaggaggagagatggaggaggcagaactcacgtcctggcgctttgtatcatctgccttttccttggatctcagccgcactaagcggcatctcgtgcctggagcccacttcctgctgcaggccttggtcagagaaatatcaggctctgaagcctctaacgttattgtcaaagtttctgccacattggtgtcaggctctgattcccaagtcctcaacgttcaacagagcaccaatagaattggccaagtcagcatttccttccccatcccaccaaccgtcacagaacttcggctcttggtgtctgcgggctccctctacccaacgatagccaggctcaccgtgcaatccccaccttcaagaggcactggctttctttctattgagccactagaccctcggtcccctcgtgtgggggacacctttatcctaaacttacaagctgtgggcatccctgcacctaccttctctcattactactacatgatcatctccagaggccagatcatggctatgagtcgggaggcccggaggaccgtgacctctgtctccgtgttggtggaccatcagctggctccttcattctacttcgtggcttacttctatcaccaaggacacccggtggccaactctctgctcatcaacatccagcccagggactgtgagggcaagctgcaattgaaggtagttggtgccaaggagtatcataatggggacatgatgaagctccaaattcaaactgactccaaagccctggtggcactgggagctgtggacaccgctctgtatgctgtgggcggttggtctcacaaacccctcgacatgagcaaggtctttgaagtaatcgacagctacaaccttggctgtggtcctggaggtggggatgatgcccctcaggtgttccaggatgctggtctggccttttctgatggtgatcgactaactcaaaccagagaggacctgagctgtcccaaggagaagaaaagtcggcaaaagagaaatgttaacttcctgaaggctcttagtgagaagttgggccagtattcttctccagatgccaagcgctgctgccaagacgggatgacgaagctgcccatgaagcgtacctgtgagcagcgggctgcccgtgtgcctcagcaggcctgccgtgagcccttcttgtcctgttgcaagtttgctgaggaccttcgcaggaaccagaccaggagccaggcacaccttgcccgaaaggtccgggacatggtgaatttgatagaggaagatgacattcttgtgcgcacctccttcccagacaactggctctggagagtggaacctgtagacagctccaaactgttgacagtgcggcttcctgattctatgaccacatgggagattcatggtgtgagcctgtccaaaagcaaaggtctgtgtgtagccaagccaactcgtgttcgagtgttcagaaaattccaccttcacctgcgcctgcccatctccgtccgccgctttgagcagcttgaattacggcctgttctctacaactatctgaatgatgacaagaacgtgagtgtccatgtgaccccagtggagggcctgtgcatggctggtggtggaatgatggcccagtgggtgatagtgcctgcaggctctgccctgcctgtggccttctctgtggtacccacagcttctaccaacgtgcccctgaaattggtggctaaagggactttggattcaagcgattctgtgtctaagattctccaaattgagaaggaaggagccatccacagagaagagatagtctacaacctcgaccccctaaataacctaggtcagatgttggagatacctggcagctcggatcccaacatagtccctgaaggagacttcagcacctttgtcaaggttacagcctctgaacccttggagactctgggctctgaaggagctttgtccccaggaggcgtggcctccctcctgaggcttccccggagctgcgcagagcaaaccatgatctatttggctcctaccctgactgcttccaactacctggacaggacaaaacagtggagcaaactgtcccctgagaccaaggaccatgctgtgcatctgatccagaaaggccacgttcggatccagcagtttcggaagaaagatggctcttttggggcttggttacaccgggacagcagcacctggctgactgcctttgtgctgaagattctgagtttggcccaggaacaggtgggcaactccccggagaagctgcaggagacggctagctggctgctggcccagcagctgggtgatggctccttccacgacccatgtccagtcatccacagagcaatgcaggggggcttggtggggtccaatgagacggtggcactgaccgcctttgtggtcattgcccttcaccacgggctgaacgtcttccgggaggggcatgcgaagcagctgaagaacagagtggaagcctccatcaccaaggcaaactctttcttggggcagaaggcaagtgctgggctcctgggtgcccatgccgccgccatcacagcctatgcccttacgctgaccaaggcctcggaggacctgcggaatgttgcccacaacagcctgatggccatggctgaggaaacgggggaaaacctctactggggcttagtccttggctctcaggacaaagttatgttgcgccccgcagacccccgtagcccaacagaacctgtgccccaggccccagccttgtggatcgaaaccacagcctatgccctgctccacctgcttctgcgggagggaaagggaaaaatggctgacaaggctgcatcctggctcacccaccagggaaacttccacggggcattccgcagtacccaggacactgtggtcaccctggatgccctgtctgcctactggatcgcttcacacaccactgaggagaaagcactgaacgtgacgctcagctccatgggccgcaatgggcttaagacccacgggctacacttgaacaaccaccaagtcaagggcctggaggaggagctaaagttctccctgggcagcacaatcagtgtcaaggtggaaggaaacagcaaaggcaccttgaagatccttcgtacctacaacgtcctggacatgaagaacaccacatgccaggaccttcagatagaagtgaaggtcacagacgctgtggaatatgcatggagcgcctacgaagactatgaagacgactataacatgccagccacagatgatcccagcgttcccttgcagcctgtcacgcccctgcagctatttgagggtcgtcggagccgccgcaggagggaggcccccaaggtggctgaagagcgggagtccagagttcactacactgtgtgtatctggcgcaatggcaagctggggctgtctggcatggccatcgcagacatcaccctcctgagtggattccacgccctgagggctgacctggagaagctgacctctctctctgaccgttatgtgagtcactttgagactgacgggccccatgtcctgttgtactttgactcggtccctaccacccgggagtgtgtgggctttggagcctcacaggaggtggttgtgggactggtgcagccagccagcgctgtcctgtatgactactacagccctgatcacaagtgctctgtgttttatgctgcacccaccaagagccagctcctggccacactgtgctctggagatgtatgccagtgtgccgaggggaagtgccctcgactgctaaggtcactggagcgaagggtggaggacaaggacggctaccggatgaggttcgcctgctattatcaccaagtggagtatggcttcacggttaaggttcttcgagaagatggcagagctgccttccgtctctttgagtccaagatcacccaagtcctgcatttcagaacggacaccatggcctccataggtcagacccgcaacttcctgagccgggcctcttgccgccttcgtttggagcctaacaaagagtacttgatcatggggatggacggggaaaccagtgacaacaagggagacccccagtacttgctggactcaaatacctggattgaggagatgccttcagaacaaatgtgcaagagcacccgccatcgggcagcctgtttccagctcaaagacttcctgatggagttcagcagccgggggtgccaggtgtgaggccttaggactctggctctctgagctcagctcagggtcagggcctcgctggatgaggggctctgctctacagggtaaataaaagaaaagctttttgacagccaaaaaaaaa

SEQ ID NO: 101 - DNA, 5537 bp, Mus Mus
agaaagtcagctcagtgtaggaaagtggaagttggattccgaaggctccaggcgtcccgaggagtttcatagtggtgggcttttgaaggtggtaccgacccaagtggaggttctagtggattttgtctgttgcttctccctgtctcccacactccaagatgaatgtgcaggcctgctctaggtgtggctatggggtttaccctgctgagaagatcagctgcatagatcagacatggcacaaagcatgttttcactgtgaagtctgtaagatgatgctttctgttaataacttcgtgagtcaccagaaaaagccgtactgtcacgcccacaaccctaagaacaacacgttcactagcgtctaccacacacccttaaatctaaccttgaagaagtctgtggcagccatgggagggattgacggcaaagaagatggcgagccatttaaatccgttctccattgggacatgaagtccaaagctggagcaggggcagctagccggctgatgaatgagagagactactggccagggtatgcagaagggaacacttggtgtccaggagctctgccggaccctgagattgtaaggatggttgaagctcgacagtctctcggtgaggggtacacagaagaccgtgaacagcagcagggcaaggggagctttccagccatgatcacccctgcctaccaaagggccaaggcagccaaccagctggccagccaggtacaatacaagagaggccacgatgagcgggtctccacattcactccagtggcggacacgcccgagctgctccgtgccaaagctgggggacagcttcaaaatgacgtgaggtacacagaagacggtgggcagcagagagggaaaggcagttttcctgctatgatcacaccagcttatcagatagccaaaagggccactgagctggcgagtgatgtgaggtaccatcaacaatatcatagagaaatgaagggaatggctagtcctgtcggagccgagggtgggatgacaaaggactctgtagaccgatgtggccaggtttactcagaagagtgtgatgaacccagaggaaagggcagcttcccggccatgatcaccccagcgtatcagaacgccaagaaggccaatgaacttgttagtgacataaaataccggcaggacttccataagatgaaaggtgcagcgcattttcactcccttgcagcccaggacaacttggttcttaagcgagctcagagtgtgagcaagcttgtgagtgaggtggagtacaagaagggtctggagaatagtaaaggtcacagtatcaactactgtgagacaccccagttcaggaatgtgagcaagatctcaaaattcaccagcgataataaatataaagaaaactatcagacccagctgagaggccactatgacggagtcggcatggacagacgcatgctccacgctctcaaagttggcagcctggctagcaatgttgcctacaaggctgattataaacatgacgttgtggattacaactacctggccactgccactccattctaccaaacaacgatgaggctggttcccctgaaggatgtcaactacaggcagaacattgacagaatgaagttcagctcggtgacaaacacgccacagattgttcaagctaagatcaacgcccagcagctgagccatgtgaattaccgagctgactacgagagaaacaagctgaactacacattgccccaggacgcccctcagctgctgaaggccaaggccaatgcagaactgttcagcgaggtgaagtacaaagaaggctggcagaagacaaaggggaaaggctttgagatgaagctggacgccatgtctctgttggccgccaaagcctcgggggagcttgctagcagcgttaaatacaaagaagaatatgagaaaatgaagggcagagccctgggagccacagactctaagcttctgcattctctgcaggtggccaagatgagcagcgaggttgaatataagaaagggtttgaggagagtaaaacccactttaacctgcccatggacatggtgaacctcaggcacgctaagaaggcccaagctcttgccagtgaccttgactacagaaagaaactgcatgactacacggtgctgcctgaagatatgaaaactcagtgggccaagaaagcctacgggctgcagagcgagctgcagtacaaagctgacctggcatggatgaggggagtcgggtggctgacagaggggagtctcaacctggaacaggcgaagaaggctggacagctcatcagcgagaaaaactaccggcagagggtggatgagctgaagttcaccagtgtggctgacagctcccagatggagcatgccaagaagagccaggggctgcagaacgcggtggcctacaaggcaggaaacgagcaatccgtccatcagtacaccatcagcaaagacgagcctctcttcttacgagcccgggccaatgctgctcaactcagcgagaccctgtacaagagcagctgggaaaagcagaaggccaaagggtttgagctgagacttgactccttggcattcctgacagccaaagccaagagagacctggctagtgaggtgaaatacaaagaggactatgaaaggtccagagggaaactcattggggcgaagagtgcacagggggattcgcagatgagccactccctgcagatgtcgaagctacagagtgacctggagtacaagaagggctttgaagacaccagatctcagtgccacatctcccttgacatggttcacctcgtccatgctcgccaggcacagcacctagccacagacgtaggctacaggacagcgtctcactgcttcacggctctgcccacagacatgaaggtggagtgggccaagaaggcttacggcctgcagagtgataaccaatacagggcagacatgaagtggatgaaaggcacaggctgggtggccaccgggtcattacatgtggagcaggcgaagaaggcaggagaactcattagtgagaagaagtaccgtcagcacccagatgctttgaagtttaccagtattaaagacactccggagatggtccaggccaggattagttatacccaagcagtggatagactgtacagggagcaaggggagaatgtgaagcaccactacacacagactgcagacttgcctgaagtcctgctggccaaactgaacgccatgaacatcagcgagactcgctataaggaatcttggagccggcttcgagatggaggatacaagctgaggctggatgcccttccattccaggcagcaaaggcgtccagcgaagttataagtgactacaaatacaaagaagcatttgagagaatgaaaggccagatgctcggctcccggagcttggaagatgacctcagccttgctcattcagtgcacgcgacctcgctgcagagtgatgtgaattataagaaaggctttgaacacgcaaaggctcacttccatctgccgctggatatggtgaccttggtgcatgccaagaaggctcaaaccctggccagcgaccaggactacagacatccgctcccccagcacacagtcttggcagaagatctgaggctgagctgtgccaagaaagctcacaagttacagagtgagaatctgtaccgctcggacttgaacttcatgcgtggtgttccctgtgtcgttcctggaacactggagattgaaggaagaaagaaagcctctgagctcatcagcgagagtaaataccgccagcatcctgggtcattcaagtacacggccgtgacagatactcccaacctcctgcatgccaagtacagcaaccagatcaccaatgagcgtctctataaagcggctggcgaggacgcacggcaccaatacacgatgacccttggtctgcctgagttcatccgagccaaaaccaacgcagccaacctgagcgaggcaaaatacaaggaggcttggcataatcttcgtgctcaaggctacaagctgacgatagacgccctccccttccaggctgctcgggcctctggagacatagccagtgactttctctacaggcacgagtttgtgaaggagcgtggacagctcattggggtgcggaatgtgagtgacgacccgcggctactgcactgcctacggatgggccagctgcagagtgagaatcagtacaggaaggaggcggccagcagccaagctcagtgccacctgcccatggatatgatgtacctggtccatgccaggaaggcccaggccctggccagtgaccacgactaccggacacagtgccacgagttcaccgccctgcctgaggatctgaagatggcctgggccaagaaagcgcacgccctgcagagtgagtttcgctacaaggcggacttgatgggcatgaaagggacaggatggctggctctgcagtctcctcagatagagagtgcaaagaaggctggagacctaatcagtgagaccaagtaccgtaaaaaaccagacagcatcaagttcactaccgtggttgactctccagacctcattcatgccaaggagagctacatgcactgtaacgagcgcttgtacaggttgggagatgcagcctccctgcatagatacaccccaatcccagaccacccggatttcacccgagcccgcatgaacgcaatgcatttgagtgacaaagtctacaggaatgcctgggagcagagccgggctggtggctatgacttcaggctggatgctatcccattccagactgcacgggtgtccagggatatcgccagtgatttccggtacaaagaggcatttctgagggaccggggcctacagattgggtaccgtagcatcagtgacgacccgaggacgacgcacttcctccgagtcggcaggctccagagtgacaacgagtacaggaaggcctttgccaaaggtcgctcccagttccacagtcgcgctgaccaaccaggcttcctccaggccaagaggagccagcagctggccagcgatgtcctctataggcagccactgcctcagcacaccagcgacccagaacagctgggcctgaagcatgcccggaaagcccatcagctgcagagtgatgtcaagtacaaatctgacttgaacctgactcgaggtgttggctggacccctcctggctcctacaaagtggaaatggctcgacgggctgcagaactggccaacaggaggggcccggggatccggggggcttctgtggagccagaggcagcagcggcgctaggagatcatcagagcaggggggtgaacccggatgcctcggagatcctgcatatccacaagaagaagactctgctgatgtgagcctccttaagaagcccccttgagggctgcttgccaaaggcatgcctctgtggctttggtctggatgagcgagtgttttaaaaaaaaaaaaaaactggcacaccctccccgtgcccacatctgcctttattaaaataacaactctgaaagcaaaaaaaaaaaaaaaaaaaaaaaaaaaaaaaaaaaaaaaaa

SEQ ID NO: 102 - DNA, 1350 bp, Mus Mus
tcttcacagtgcgaaagaactgaggctttttctcatggctgaaaacaaacaccctgacaaaccacttaaggtgttggaacagctgggcaaagaagtccttacggagtacctagaaaaattagtacaaagcaatgtactgaaattaaaggaggaagataaacaaaaatttaacaatgctgaacgcagtgacaagcgttgggtttttgtagatgccatgaaaaagaaacacagcaaagtaggtgaaatgcttctccagacattcttcagtgtggacccaggcagccaccatggtgaagctaatctggaaatggaggaaccagaagaatcattgaacactctcaagctttgttcccctgaagagttcacaaggctttgcagagaaaagacacaagaaatttacccaataaaggaggccaatggccgtacacgaaaggctcttatcatatgcaatacagagttcaaacatctctcactgaggtatggggctaaatttgacatcattggtatgaaaggccttcttgaagacttaggctacgatgtggtggtgaaagaggagcttacagcagagggcatggagtcagagatgaaagactttgctgcactctcagaacaccagacatcagacagcacattcctggtgctaatgtctcatggcacactgcatggcatttgtggaacaatgcacagtgaaaaaactccagatgtgctacagtatgataccatctatcagatattcaacaattgccactgtccaggtctacgagacaaacccaaagtcatcattgtgcaggcctgcagaggtgggaactctggagaaatgtggatcagagagtcttcaaaaccccagttgtgcagaggtgtagatctacctaggaatatggaagctgatgctgtcaagctgagccacgtggagaaggacttcattgccttctactctacaaccccacatcacttgtcctaccgagacaaaacaggaggctcttacttcatcactagactcatttcctgcttccggaaacatgcttgctcttgtcatctctttgatatattcctgaaggtgcaacaatcatttgaaaaggcaagtattcattcccagatgcccaccattgatcgggcaaccttgacaagatatttctacctctttcctggcaactgagaacaaagcaacaagcaactgaatctcatttcttcagcttgaagaagtgatcttggccaaggatcacattctattcctgaaattccagaactagtgaaattaaggaaagaatacttatgaattcaagaccagcctaagcaacacagtgggattctgttccatagacaagcaaacaagcaaaaataaaaaaaaaa

SEQ ID NO: 103 - DNA, 806 bp, Mus Mus
gccgagccccgctctgctgagatgctgcgggcaggagcacctaccgccggctcgttccggacggaagaagtccacaccgggacaaccatcatggcagtggagtttgacgggggtgtcgtggtgggctctgattcccgggtgtcagcgggaacagcagtggtgaaccgcgtgttcgacaagctctcccctctgcaccagcacatcttctgtgccctctcaggttccgctgctgatgcccaagccatagctgacatggccgcctaccagctggagctacacgggttggagctggaggagccgcccctcgttctggctgctgcaaacgtggtgaagaacatctcctacaagtaccgtgaggacttgttagcgcatctcatagtagctggctgggaccaatgtgaggggggacaggtatatggaaccatgggagggatgctaattcgacagccctttaccatcggcggttccggaagctcctacatttatggttatgtggacgcagcttataagccaggcatgacccctgaggagtgccggcgtttcaccacagatgccatcactctggccatgaaccgagatggctctagtgggggtgtcatctacctggtcaccatcacagctgctggtgtggaccatcgagtcatcctgggagatgagctgccaaaattctacgatgagtgactgatccccagaagtcccttccttgtttgtaataaactttctggaaccagaaggccggtgcgatgggcaaaggtgaaatatgtgtatcagagagacacggtgtgtggagggaagcgtcctccccg

SEQ ID NO: 104 - DNA, 3774 bp, Mus Mus
agtggagcccgctccgagcacaggttataaagccccggctgcggcagcggactgcggagtcaagatgcgcccgaaagagcaggtgcagagcggtgcgggagacgggacagggtcgggggacccagcagcaggcacccccacgacccagcctgcagttggtcccgctccggagccctcggcggagcccaaacctgctccagcgcagggaaccgggtccggacaaaaatcaggatcccgaaccaagacaggaagcttttgtcggtccatgatcattggtgattcggacgcaccatggacccgctacgtattccaggggccttacggtccccgggccactggcctgggcactggaaaggccgagggaatctggaagacaccagccgcgtacatcggccggaggcccggcgtgtccggccctgagcgtgcggcgtttattcgagagctgcaggaagcgttgtgtcctaatccaccacccacgaagaagatcaccgaagatgatgtcaaagtgatgttgtatttgctggaagagaaagaacgggacctgaacacagccgcccggatcggccagtccctggtgaaacagaacagtgtcttgatggaggagaataataagctggaaaccatgctgggctcagccagggaggagattttacatctccggaagcaggtgaacctgcgagatgaccttcttcagctctactcagactctgatgacgatgatgatgaggaagacgaggaagacgaggaagagggcgaagaggaggaacgagaaggacagagggatcaagaccagcagcacgaccacccctatggtgcccccaagccacaccctaaggctgagacagcgcaccgctgcccacagctggaaaccctgcagcagaagctcaggcttctggaggaagagaacgaccacctgcgagaggaggcctcccaccttgacaacctggaggacgaagagcagatgctcattctggaatgtgtggagcagttctctgaagccagccagcagatggcagagctatcggaagtgctggtgttgaggctggaaggctatgagaggcagcagaaagagatcactcagctgcaggccgagatcaccaagctacaacagcgttgtcagtcttatggggcccagacagagaaactgcagcagatgctggcctcagagaaggggatccactcggagagcctgcgagctggctcctacatgcaggattatgggagcaggcctcgtgaccgccaggaggatgggaagagtcatcgccagcgctcctccatgcccgcaggctctgtcacccactatggatacagtgtgcctctggatgcacttccaagtttcccagagacactggctgaggagctccgaacatctctgaggaagttcatcactgaccctgcgtatttcatggagagacgtgacactcactgcagggaggggcggaagaaggagcagagggcgatgccacccccaccggctcaagatctcaagccacctgaagattttgaggctccagaggagttggttcctgaggaggagctgggggccatcgaagaggtggggacagctgaggatgggcaggcagaagagaacgagcaggcgtctgaggagaccgaggcctgggaggaggtggaaccggaggtggacgagaccacaaggatgaatgtggtggtctccgccctggaggccagtggcctgggcccttcccacctggacatgaagtatgtcctccagcaactgtccaactggcaggacgcccactctaagcggcagcagaagcagaaggtggtcccaaaaggtgagtgttcccgcagaggacaccctcctgccagtgggacaagctttcgatcatcaaccatatgagaggtgagagtaggtgaacatccaccccctccccagtgatcgcttaccttaactaggtcccacccagtgtgctgatttgcatggactttgcatacgatttacatactatttacatagttgcctccagtcccccttggctagaactgctgcctcagtgtttatttatgcaaaatctgcttacaagtccagctgtccgtccaccttcttccttggggggctgaactgggaatcagggttgggctatacacacctttgtacctcaacttcctatctctgccctatccttcatcccgaattcctctacccaccaagactccccaaccccgcagcagcaaacaaacatggggggcgggatcctggagcagcagcccagagtgccgacccaggactctcagaggctggaggaggacagggccactcactctcccagtgccagggaggaagaggggccttctggggccacctaggcctggaacgaaggcctctgccagcaagggccacagttggaccattcccccgggtgagtgtggggctcctgcagggtggtaggggcgggtcagggttccctcagcccatctagaaaccccagctttggggagctacgtgctctgagggcaggcctttccggcactccctctgaggagctgtctgggaaatcagatgacttagcatcggatcttcttttgtgttagctcctttcgtcttcatggccctgtgggtgggtacatgtgattgtgcaccatttattagaagaggaacccgaagttcagagatctgagatgacttggccaaggtcatactaggagcagatctgagcccgtgtctatgagttctgaacccctggcctggtctcactgctgtccgcacctcctgctcccatctttgcgttccacctgaagttttggcagcctccttcagtcgttctgatgcccccacccccgttttggggtgcaccaatgggtggaacatccctggctgcggcacagtaagatggcgcaggttgtaagctgggtcagcacttccgtggctgaccacgggggacctgagtgagggccagtggtggttttctgtcgtctcctctgtcagggccgactgggtttgagggtggtctggctcctgactcccatccacccccttctcttcccgggcttgctgtttcccagcagccggaagaagccccacagacagcttgagaccccctccttctgctgcctggccaagtcccacccttcctttctttcctctgaaacaggaccctaccccccgccccccccatgtctgccagaagttctccctctcctgtcctggtagacctgtctcctcttgtaggacaggctgaaagaaccccggtccctcattctgaaactggggccaaagctgtggctgctggaaccccaggggtggaagcaaactgggcagattggctggctaccagatccagctctgagatgggtgtgagtgggcgtgtccctagggtaggcagttattgggggggggggggtcctctctatcccttgaacctctcacgtaaagggacttccccagtcctggttggctttttgaacctggtccttttcgctcttttttacccttctccgtttctattactgtgtgtgacgtaaagtgtatctgcgtgagggttgtgtccctctgcccagtgctgtctctgtgtcctgtggcctgtgagtttccttctagagttctgccttcctccacatccgtgctcacacagagctgtggcctcagcgcctgccctgcttctgcagcgcttcatagtcttgtagctagtcagcctttgtattgatgtatgtgccaatgtgggaaataaagaacttgtgagatatcaaaaaaaaaaaaaaaaaaaaaaaaaaaaaaaaaaaaaaaaaaaaaaaaaaaaaaaaaaaaaaaaaaaa

SEQ ID NO: 105 - DNA, 3774 bp, Mus Mus; identical to SEQ ID NO: 104

SEQ ID NO: 106 - DNA, 2467 bp, Mus Mus
tgctctggcccagccccgcggcctccgggctcgggctcggactgggagcggaaattcctgcaggggctggacgctacgggcagagctcaggatggagcccgtggaggcctggacccccgggaaggtggcagcttggctgagaggccttgatgatgccctacaggactatcccttcgaggactggcagctgcctgggaagtacctgctgcagctctgtccccaaagcctcgaggctctgactgtgtggcctttgggccaccaggaactcattctagatggggtggaacagctccgggccctgggctctaatctacagacagagaacctgcagagcctggctcaggggctgctggaaaggacccaggccttccaaagcttggtccaaggctctctgggcaactgtgctgagacaccggctgacgtcctcaaggctgcggtggagctggtgcgggaagcccatgccctcctctcttggctcaacgggtacctcttctctcacttaaatgacttctctgcctgccaggagattggcgtgctgtgcggggagctgggccaagtcctgcaggaggactgcccagaggctgagaaggaacgaaacatcctaaggatttgcagccacgtggctgggatctgtcacaacatcctgagctgcagcccagaggagctgctggaacagaaggccgtgctggagtcggtgcaggtggacgacccttccggtctagaaattcacaccaccagcaactgcctgcactttgtgtcccgagtaggggttcaggctgccaccagctcccagatcctgccaggagacgagattgtccaggtcaatgagcaggtggtggtgggctggtcccataagaacatgctgagggagctgctgagggaaccagcaaaggtcagcctggtactgaagaagattcccgtgccagagaccccctcacagacgtccctggactctcctcacctgctaagccaatcgctgcccctgaacccaccgtctcccagggttccgtctgaaggtcttttagcagatggaactcctggacccagccctgcttggacagactctacctcctttgacgctcagtccccgcccactccccctggaccaccaggcgtacttccagaagaaacagcagaacctctggagtcttcgggacaccctgacaagagtcccatccttggtcggaagaaatctaaaggtatagccacgaggctgagccgccgccgggtgtcctgccgagagttgggtctgccggattgtgatggatggcttctactgcggaaggtacccggtggctttatgggcccacgctggcgccgctgctggtttgtgctcaagggacacaccctatactggtaccgccaaccccaggatgaaaaggccgaagggcttatcaatctctccaactacagcctagagagtggacatgaccagaagaaaaaatatgtgttccagctgacccatgatgtgtacaagcccttcatctttgctgccgagaccctgtctgatctgagcaagtgggtgcgacatctcattacctgcatttccaagtaccaggctcaaggccgggccccctcctctgccagagaggaagactgctacagtgagacagaagcagaagaccccgatgaggaggctgggtcccgctccgcttctcctggcccagctcaagcgtggagtgacacatcacccgtggcttcacccctgcagagtccgagaacttcctttaactcttcaccagacagcagtgacagagccctggaaggaatggtacaggggctgaggcagggaggggtgtccctcctgggccagccccagcccctgacccatgaacaatggcggagttctttcatgaggcgcaaccgtgaccctcatctcaatgagcgtgcacaccgtatccgggcactccagagcaccctcaaggcaaagctgcaggaactgcaggccctggaggaagtgctgggtgatcctgaactcacaagtgcaaagttccgacagtggaaggaacagaaccaggagctatactcagagggcctgagaacctggggagggacgtgggcccagaccagctcctcagacccaaactctgactccagggctcattccccacagcccctcccctttgaccctgaagagccctcccagctttttcccttaaccccagagaacagccgccaacctcctgacctctgaccctggctgaggactacttcattcccagtctctgacgtgtttaagacatctccaagaacagaccttccacacactctgctcacgtgtcccctagagtggaaggaaatctcccgccctctctgtgaggcagaaatccctcaacccatcctcagatctgggatgtccctgccttcctggggcattcaaaaaggtttcccagaccagatctggataggtgtttattttacacgagagccgcttttccaccaaataaagttgatttctctgacgtga

SEQ ID NO: 107 - DNA, 4241 bp, Mus Mus
ctgagcgccaaactcaaactcatcgggaccggctcttctttgcagccgggaccgaaggccgggcctactgggcttcttcaccctcccgtcggggcagcggtccgacatgagtcaagttctgttccagcagcttgttcccttgctagtgaaatgcaaagactgcgaggagaggagagggagcgttagagtgagcattgagctgcagtccctttcgaatccagtacacaggaaggatttagtcatccgtctgactgatgatacagatccgttttttctgtataaccttgttatatctgaggaagattttcaaagtttaaaattgcagcaaggtctcctggtggacttcttagctttcccacagaagtttatagacctccttcagcagtgtatgcaagaacacgcgaaagagactccaaggttcctgctgcagcttctttcttcagccactcttttggagaactcaccggtccttttaaacgtagtggagacaaatccttttaagcatcttattcacctgtcactaaagcttttacctggaaatgatgtagaaataaagaaatttctagcaggatgtttgaaatgtagcaaggaagaaaaattatcactgactagatcactagatgatgttaccaggcaactgcacattacacaagagacgttgtcggaaaaaatgcaagaattagataagctgcggagtgaatgggcctcgcacacagcatcgctgacgaataagcactctcaggagttaacagctgagaaggagaaggccttgcagacccaagttcagtgccaacagcagcacgagcaacagaaaaaggaactggaaaccctccatcaacggaatatccaccagctacaaagcagattgtccgagttagaggcagctaataaagagctcaccgagaggaagtataaaggagactcgactgtccgagagctaaaggcgaagctggctggcgtggaagaggagctgcagcgggccaagcaagaggtcctttctctgagaagagagaattgtactctggatactgaatgccacgagaaagaaaagcacatcaaccagctacaaacaaaagtggccgttttagaacaggagatcaaagataaagaccagcttgttctgagaacaaaagaagcattcgatacaatccaagagcaaaaggtggctttagaagaaaatggtgagaaaaatcagatacaactgggaaaacttgaagctacaataaaatcattatcagcagaacttctaaaggcaaatgagatcatcaagaagttacaaggagatcttaaaactctgatgggtaaattgaaactgaagaatacagttactattcagcaagaaaaactattggctgagaaagaagaaatgctacaaaaggagcgaaaggaatcacaggacgctgggcagtttcttcgtgccaaagagcaagaggtatgcagattacaggaacaattagaaactacagttcagaaactcgaagaaagtaaacaacttttgaaaaataatgaaaaattaatcacgtggctaaacaaagagctaaatgaaaatcagctggtaagaaaacaggacacattgggaacctctgccaccccacattctactagcaacagcaccatcagaagtgggctctctcccaatctgaatgtggttgatagactaaattacccaagctgtggaattggctatcctgtctcctctgcattgacattccagaatgcttttcctcatgtagtagctgccaaaaacaccagccaccctatctctggaccaaaggttcactttaacctgcagcttacaaaaccaagcgcttcgatagatgggcagccgggagccgctgttaacaggccttgttcaaatgataaggaaaatggtgaaactttaggattggaatccaaatacttgaagagaagagaagctagcattcctttacgcggacttagccagaatctgttgagtgactcagaccatcagaaagacggcatgctgggagcgttccagctatcttccaaacccaccgttctcccctcctcgtcttcagcctacttccctgggcagttaccaagtagttaatccaacaccttttactgctcaccgacagtttaggaattcaagtgatttaacagactattgataacaaaatcaatttttttctggttcctgttaggtcatttggatcctttataatactgctgccatttacaaatttaggaaattgataaggatgctgagtaaatggtatttttttttctgtgaacaaaacagaatgtttcaaaaagtcactggattgtatcagattcttaccagttggtctgcttagggacactttatcaagatacacctgcagggaatataaactgaagacttgtgattcattcgatcatttttattgtaaaaaaaaaaaaatcttaatctgccacctgagagctgggagagcttccacctgtgaccattgagccttacattgactttacattcagttctcatacaactttcaaagttttttttttttttttttttttgagacagggtctattattatgtagttcaagctgtcctggaactggctatgtatgtagaccaggctggcctcaaacccagatccacctgcctctgtgtcccaagacctaggactaaagctgtgtacccaccaagcctgagttacacaatatatttggtttataatttctcctcccagatggtctccagtttcctacccacccaattttatgttctttctcccttaaaaaagaaaataaaaataaccaatcagtaagataaaaatatcaaaccagccgggcagtggtggcgcacgcctttaatcccagcactcgggaggcagaggcaggcggatttctgagttggaggccagcctggtctacagagtgagttccaggacagccagggctgtacagagagaccctgtctcgaacccccttccccccccccaaaaaaaaaatcaaacccaaaacagtgtattcgaccttgtgctagtcaagtcctgggtatgggcatttggagtttggttgatgtacctagtgacactcttaaggattttgagtgaaattaagtattcatagtgagtaaatcattttctctgaaataatttttatataaaaatcattgggacagtgtatttacatgactgaagtgctttagtcatctgggcattccataaagatcatcagtgtaataacaccataaaagttcatgggactttttataatattaaaatttgtcatcagtgttaataaagcaggaggagagttaactattggaaattacaacttcctcactattaaaaacttccaagaactattcctttgaaattaagtagttttaaaaaacaaaatgaaacaaaaaaccaaaaacaaccctctataatcttagaggtctaattttgttttcttgttgacaaccacccaaaggaaattaaaattccaagaccccaaaaatcttatctgtaaaatgttaacaatcatgtgatattttaagtttcaaggggctgaagagatggcttagtgatgatcggcactagctactcttttcagaggatgtgggttctaatcccagcacccacatgacagctcacaattttgtcacccagagtgcatcaggcatgcatgtggtttctaggcaaaacatttatacacattttttttcaagtactttacactgttgcagacattttgagacagtgacgtagaatctttagcctcactttcaggatgatggctattgctagctgtcttcaacgagggctgttatcacagttcagtgatgggaagaatattgctataactacttgaaagcacttattctggaaagaagtctctctatgcagcacaggactgttgtaaatactatagaataaacctaagagctatggcagcctttggaaagggatacaagacatatatagctttttagaagagataccctccccttactatttataaacctgtttccacgataggacagctcatttccacgcagggtgttggtgacctgtctctgtgctaagtgtccacacacacagatagcgccaactctctgctctacctcttctgcttttgtctgaaattgttttgtgttgtataactgtacatgtgttaaccatcagaatgttgctttttgctatttctgaaagctgtgacctttgtcaataaagcactgaggcttgagcgttttatatgcaagaagcatgtttaggaaataaaagactaactgtgcttaggaaatc

SEQ ID NO: 108 - DNA, 3873 bp, Mus Mus
cgggtgcagggcagaaggcccaggacttgagctacagtgctctgcctcgacaattgacaagaccagctagcaacgatgggaaactggctgactggaaactggtcatctgacaggtcatctggctattcatctggctggtcacctggtgggtcttcaggggtgccctccgggccagtgcacaagttagaaaagtctatccaggcaaacctcacacccaacgaaaactgtctgaagcagattgcggtgtcctcggtgccatcgcagaagctagaagggtatatccaggaaaacctcaaacctaacagagaatctctgaagcagatagaccaggccgtggatgccatctgggacctgctgcgcagtcagatccctgtgaaggaagtggctaagggtggctcctatggccgggaaacagccctaagaggctgctccgatggtacccttgttctcttcatggactgcttccaacagttccaggatcagataaaataccaagatgcataccttgacgtcattgaactgtggctgaaaatccatgagaagaagtcagtaaagcatgaacatgcccttgtagtacaagtgtctgtaccagggcagagaatactcctgcaattacttccagtcttcaatcctctacgctccaatgagaatcccagctcctgtgtctatgtggatctcaaaaaatccatggatcaagtaagagcctcaccaggggagttctcagactgcttcaccacactgcagcagcggtttttcaagaaatatccccaaagactgaaggatttgatcctattggtcaagcactggtatgaacagtgccaggagaagtggaaaacacccccacctcagccattgctgtacgcactggaactgctcactgtgtatgcctgggaacagggctgccaagctgaagacttcgacatggcacaaggcgtcaggaccgtgctgcgacttatccagcggccgacagagctgtgtgtctactggacagtcaattacaactttgaggatgagacagtccggaacatccttctgcaccagctcaggtcccaaagaccagtcatcttggatccaactgacccaaccaataatgtgggcaaagatgatgggttctgggagctactgacagaggaagctatggcctggctgtactctcccagcctgaatactgagtcacctgcaccatattgggatgttctgcccatgccacttttcgtcactccaagccacttactgaacaagttcatcaaggactttctccagcccaacaagctcttcctaaagcagatcaaggaagctgttgacattatatgttccttccttaaaaatgtctgcttcttgaattctgacaccaaagtcctgaagaccgtcaagggaggatccactgccaaaggcacagctctgaagcggggatcagatgctgacattgttgtgttcctctcctcgctggagagttacgactctctaaaaaccaaccgctcccagttcgtccaggagatccagaagcagttagaagaattcgtgcaggcgcaggagtgggaggtgacgtttgagatttcaaaatggaaggctcccagagtgctgagttttaccttgaaatccaagactctcaatgaaagtgtcgagttcgatgtccttcccgcctatgatgcactaggtcaactgcggtctgacttcaccctcaggcccgaagcctacaaggatctcattgagctgtgtgcatcacaggacatcaaagaaggagagttttctatctgttttactgagctgcagagaaacttcattcaaacccggcccaccaaactgaagagtctactccgcctgatcaagcactggtacaaacagtatgaaaggaagatgaagccaaaagcatctttacccccaaagtacgccctggagctgctcaccgtgtatgcctgggagcagggcagtggcacagatgactttgacattgctgaaggcttccggaccgtcctggacctggttataaaataccggcagctctgcatcttctggacagtcaattacaactttgaagaggaatacatgcggaagttcctactgacccagatccagaaaaagaggcctgtaatcctggatccagcagatcccacaggcgatgtgggaggaggtgaccgctggtgctggcatcttctagctgaagaagcgaaggagtggctgtcctccccttgtttccaagtggagcaaaaaggcctggtacagccttggaaagtgccagtaatgcagacccccggaagctgtggaggtcagatctaccccactgtgggtggagttactaagtaggagtccattcagctctggaagacgcttctggagtgatctggcaaagactcagactgtgttagaaaagggagcctggttcagtcctctctggcaggctcgcacctctattcttccttcttggaatcaagacatgggattatccttcctcctcccccagggtctcacagcacaggccctgctctgtgtgagtgacctccttcagagacacttgccccatgcagctcgatgggttctggttttgtctgtattctgtgcagttattttcctgcctcctgctctgttagtctctagtcagcagctccagactcaccctgtgtcactaaggttaaggccctccctagcccttcagcattgtcaatcccaactagccctcggagtcttccattgtgcgtctttgcctgtctctttccctgtccctgtggatacagagatgtaccatccatccagcagctagccaactcccctccctccacctctgctgttaaaaccctttctcttggggaaatgtaaacaatatctacctctcttaatgtcccaggacaaactaagctgcatttctcccttccctgagaagccaaagcttccctgattgagcttagctgctcacaggagaggggttacaggcctttgaagctgccacactagaagatctgcacccagctagatgggtgcagatggcttccctggggctgcataaagagaacccctcccctcatctttcctcctgtatcctctagcccctctcagagatcctgtgcaatcagggcagaatagcatgcagctggttgaaaccacttgctaaataactcaggtgagggtcccataaccttcccagcccacctcccttccaagagtgaagataacagtcaacaagcccagctgtgatgttcattgataagcaggctctggtggactcctaaagatggtgccagtgtggctcagtgaatagccctgcataacattttacacacaccaaatgctggttgatatctcttgctggctgcccagggagccttcaccccagggctttaactgcacagagacatgaggtctaagcccttcgcatccccaagtaaggctgagccttttttctgcctgtgcttgctctgatgcattgaggatcatgcctggccactgtgcaacttttaagcagagccgtgcaacatcccagggagttgacttctatgtaaacaccttcatccatttctgatgtatgctttgaggtggctcaggctgggctagcccagcccagacagaaatcctaggcatgtgattagaggatcagaacccttctggcccttcttcaggggagagatggggctgaaggtggggttcaaatctcatgccgagtgatggaacccgacatccctaggtgctaaggccccaccaaattctctggataaggaagttccaggaatctttactgataaacatcccaatgtatcaacaaggtagactctgacctccatgggacagaagatcctgggtcagtcccctccctggggactctgcagttggctgttcatttatatgcttcataataaatggtttctttgtgtaaaaaaaaaa

SEQ ID NO: 109 - DNA, 3059 bp, Mus Mus
gcagagctcaagcgagttctcccgcagccgcagtctctgggcctctctagcttcagcggcgacgagcctgccacactcgctaagctcctccggcaccgcacacctgccactgccgctgcagccgccggctctgctcccttccggcttctgcctcagaggagttcttagcctgttcggagccgcagcaccgacgaccagatggagctggaccatatgaccaccggcggcctccacgcctaccctgccccgcggggtgggccggccgccaaacccaatgtgatcctgcagattggtaagtgccgagctgagatgctggaacacgtacggaggacccaccggcatctgttgaccgaagtgtccaagcaggtggagcgagagctgaaagggttgcacaggtcggtgggcaagctggagaacaacttggacggctacgtgcccaccggcgactcacagcgctggaagaagtccatcaaggcctgtctttgccgctgccaggagaccatcgccaacctggagcgctgggtcaagcgtgagatgcacgtgtggagggaggtcttctaccgtctggagaggtgggctgaccgcctggagtccatgggcggcaaatacccagtgggcagcgagccggcccgccacactgtctctgtaggtgtggggggtccagagccctactgccaggaagctgatggctatgactataccgttagcccctatgccatcaccccgccacctgccgcaggagaactgcctgaacaggagtcagttgaggctcagcaatatcagtcttgggggccaggtgaggatgggcaaccgagccctggtgtggatacacagatcttcgaggacccacgggagttcctgagccacctggaagagtacctgcggcaggtgggtggctctgaagaatattggctgtcccagatccagaaccacatgaatgggccagccaagaagtggtgggagttcaagcagggctcggtgaagaactgggtggagttcaagaaggagtttctgcaatacagtgagggtacactctcccgtgaagccattcagcgggagctggagctgccgcagaagcagggtgaaccactcgaccagttcctctggcgcaagcgggacctgtaccagacactgtatgtggacgctgaggaggaggagatcattcagtatgtggtgggcaccctgcagcccaaactcaagcgctttctgcgccacccactccccaagaccctggagcagcttatccagaggggtatggaagtgcaggacggcctggagcaggcagctgagccttctggcaccccactgcccacagaggatgagacggaggcactcacacctgctcttaccagcgagtcagtagccagtgacaggacccagcctgaatagaggggccagcccagggtccccagcccgcctgccacacccagcctgtggcttttgccaactaggacttgagctggggctgactcccaaagggatgccctgtccagccagacatctactcacccactgacctggcctgactcacaactgccacacaaccatgctacatggactgaacatcaagaagcccctttcccatagggctcccacctgccgcctacccctcatctgtctgccctggtcctggcccccagccccattggcctcaccctctacactctcagaccatcacagaacacgatctggcttcctcattctgctccagtgtccagggctctttgggtaatcaagaaaccaagtgtctgaaaggcaacaaaaagtaggcaccaaaacccaggggacatcctagggcagatgctaaagcagagatgctgagggaacctcaacttccggggatgcagcccactcctgcagacacagcagatccagctggtaccctagctgccgcccagggcaaccggccagtcttgggcagcatagctcccctcccaggggtgagctgaagccacaaatgcagctgaagcagcagacctgacatcctggcacctcctggcccccagcagtgattcataccagtgaagaagagcagagctcagctccgtgactcagccatggcaggcggagggtccccgaggggctgagtcctcacacccagccgaggcagcggctggagcctacagagccaggagaatgacaccaggtctcaaggctgctgagaagtctttgctgccatgtctggaaagggcatcaccacaccaccagcaccagcaccatcctctcttctcctgaagctgcctacatgggttccaagacactttcaaggcagagaaaacaagattacagagaggaggtgcctggcagggggcagcaccccagctcagcccaagagctgaaggtgaagacaagccagcatgaaaccacgggtctgccatgatgcccgccccgctggccgctcactagctgcctgccattagcctctgcagcttgagcagggtctgtacccttggtcctcttggcacagagcccagctcgctgcatggcctttggctccccgaccagacccttgcaggagccttaaggcttgggcccctgcccagcctgatctttcctgctgtgccctgcctgccaggtcaagcccagtcccaggagaccccaggccttggctcctaggctgttccatgaacctccctgacctgcctggtgattgcccagctgaaacctcagccaagccccagctccaattaccttgtgctggtagctgcttgtgtctgcagtctgagtaggccttgttgcggttcctccatctgcctggtctattggtgttctgagaccaattccactgatgttctgacagatcctccaccctgtgcccctgccagcccccacaagtttatttttgcacaaaagccatgacccatactcatttggctggcatagggtgtgtaggtaggccctggggactagggagaccctggagatctcaagagagtgtggctatcccctattttcaccaagccttgaatatccagccaggctgtctgcccataccatcttacctcaaagacagatatatatctatatatgattttgttaataaaactatgaaacttaaa

SEQ ID NO: 110 - DNA, 1573 bp, Mus Mus
ctaatgagcatccagggagaaagcgttaagtacccggagcatccagcctggaccgttgggcgcacgagcggcggttgaggagcagctctgaggatcggctgaggtgctctgctaggagttcagcatgcgtgagtgtatctctatccacgtggggcaggcaggtgtccagattggcaatgcctgctgggagctgtactgccttgaacatggtattcagcctgacggtcagatgccaagcgacaaaaccattggcggcggggacgactcattcaacacattcttcagtgagactggagccggcaagcacgtgcccagggcagtgtttgtggacctggagcccactgtggtcgatgaagtacgcaccggaacctaccggcagcttttccacccagagcagctcatcactgggaaggaagatgcagccaacaattatgccagaggtcattataccattggcaaggagattgttgacctggtcctggaccggatccgaaaactggccgatctgtgcacgggactgcagggcttcctcatcttccacagctttggaggtggcacagggtctgggtttgcatcgctgctgatggagcggctttcagtggactatggcaagaagtccaagctggagtttgccatctacccagccccccaggtttctacagcggtcgtggagccttacaactccatcctgaccacgcacaccaccctggagcattccgactgtgctttcatggtggataacgaagccatctacgacatctgccggcgcaacctggatattgaacgtcccacatacaccaacctcaaccgtctgattgggcagattgtgtcatccatcacagcctccctaaggttcgatggcgccctgaatgtggacttaacagaattccagaccaacctggtgccataccctcgcatccacttcccactggcgacctatgccccagtcatctctgctgagaaggcataccatgagcagctgtcagtagcagagatcaccaatgcttgcttcgagccagccaatcagatggtcaagtgtgaccctcgccatggcaaatacatggcctgctgcatgttgtaccggggggatgtggttcccaaagatgtcaatgcggctattgccaccatcaagaccaagcgcaccatccagtttgtagattggtgcccgactggatttaaggtgggtattaactaccagcctcctactgtggtccctgggggagacctggccaaggtgcagcgggctgtgtgcatgctgagcaataccacggccatcgcagaggcctgggcccgcctggaccacaaatttgacctcatgtacgccaagcgggcctttgtgcattggtacgtgggagaaggcatggaggaaggggagttctccgaggcccgggaggacctggcagcgctggagaaggactatgaagaggtgggcgtggattccgtggaagcagaggcagaagaaggggaggagtactgagcgcatgggtctggctggcggccgtccatttacaccttccccaccattggaaataaaggatatgtttacttattaaagtttctaaatggaaaaaaa

SEQ ID NO: 111 - DNA, 800 bp, Mus Mus
cagcaccagcaccagcctcagtctcagcctcacagcaacatgtggccaaacagtatcttggtcctcatgacgctccttatttcctctactctggtaacgggaggtggagtcaaaggcgaggagaaaagagtttgcccgcccgactacgtccgctgcatcaggcaagatgatccccagtgttacagtgacaatgactgtggagatcaggagatatgctgcttctggcaatgtggcttcaaatgcgtgctgccggtgaaagacaacagtgaagaacagatccctcagagtaaggtgtgatatctcataaaaatggcctcagaggactgcttccaccgtggaaggacacagcaagaagatacaaagaccagaaaccaggcctttccagatactggatctctgggcaccttgatcttggactccccaacctccagaactctgagaaataaatgttgtttataggccattcagtctatggtaatttgttacagtggtccaaatagactaatacaacttaatagtttaaaaaaaaatccttgttcaatattatgtgtgtgtgtatgtgtgtgtgtgtgtgtgtatgtttgtttgtgtgtttgtgtgtgtatgtatatgtatgtacatatacatgcatgaataattctggaaatatacatttttttggaaaaactattaaactttattatatgacattttttacaaatctgaataaataggataaaattgtcaaaaaaaaaaaaaaaaaaaaaaaaaaaaaaaaaaaaaaaaaaaaaaaaaaaaaaaaaaaaaaaaaaaaaaaaaaa

SEQ ID NO: 112 - DNA, 2179 bp, mus mus; identical to SEQ ID NO: 4

SEQ ID NO: 113 - DNA, 4913 bp, Mus Mus
agtgtgtgggaggaacgcaggggctggaataggagggaaaggaggtggctccaggagagagcgagagagggagcgctcgcatcggggctcagtggcaccagacctaaaaagaaatctaggcaaggctccggcacagtccacgtggtggaaagataaggaattggaacagaaccaacagtcgtttctacagcctctcaatggatcctgtcaggccgttgttcagggggcccaccccagtccacccatctcagtgtgtgcggatgccaggctgttggcctcaagctcctagacctttggaaccagcttggggtagggcaggacctgcaggcagaggccttgtgtttagaaaaccagaagactccagcccaccactccagccagtacaaaaggattctgtaggtttggtgtccatgttccgtggcatgggtcttgacacagcattccggcctccttcaaaacgagaagtgcctcctttaggcagaggagttctaggtcgaggcttgtctgctaacatggtccgcaaggacagagaagaaccccgttcctctttgcctgatccttcggtgctggcagctggggacagcaaactggcagaggcttctgttggttggagtagaatgctgggaagaggtagttctgaggtctctctgttaccactgggacgagcagccagtagtataggcagaggaatggacaaacctcccagtgcctttggcctcacagctcgggatcccccacggctgccacagcctccagctctgtctccaacttcactgcactctgccgatccccctccggtcctgactatggaacgaaaggaaaaagagcttttggtcaagcaaggatcaaaaggaactcctcagtctttgggactgaacctcatcaaaatccagtgtcataacgaagcagtttatcagtaccatgtgactttcagccccagtgtggaatgcaaaagcatgaggtttggcatgttgaaggaccaccagtctgtcactggaaacgtcactgcttttgatggctctattctttatcttcctgttaagcttcaacaagttgttgagttaaaaagtcagaggaaaactgacgatgccgagatcagtatcaagattcagctgacaaagatcctggagccgtgttctgacctgtgcatccccttctacaatgttgtcttccggcgggtaatgaaacttctggatatgaagcttgtggggagaaacttctatgaccctacaagtgccatggtactgcagcaacacagattgcagatctggcctggctatgcggctagtatccggaggacagacgggggtctcttcctgctcgctgatgtctctcataaggtcattcggaacgactctgtgctggatgtcatgcatgctatctaccagcagaacaaggagcacttccaggacgagtgcagcaagcttctggttggcagcattgtcatcacgcgctacaacaatcgtacctaccgaatcgatgatgtggactggaacaagacccctaaagacagctttgtcatgtcggacgggaaggaaatcacattcctggaatactacagcaaaaactatgggatcacagtcaaggaagatgaccagccgctgctgatccaccggcccagtgagagacagaataaccatggcatgttgctgaagggcgagatcctgctgctgcccgagctctccttcatgacggggatccctgagaagatgaagaaggacttcagggccatgaaggacttgactcagcagattaacctgagccccaagcagcaccacggtgctttggaatgcctgctgcagagaatttcacaaaacgagacagccagcaatgagctgacccgctgggggctcagtctgcataaagatgtccacaagattgaaggtcggcttctgccaatggagaggatcaacttaaggaacacttcatttgtcacatcggaggacctgaactgggttaaggaagtgaccagagatgcttccattctaactattcccatgcatttctgggcactcttttatccaaagagagcaatggaccaagccagagaactggttaacatgttggaaaagattgccgggcccattggcatgcgcataagccccccagcctgggttgagctgaaggatgaccgaatagagacctatatcaggaccattcagtccttactgggagttgaggggaagatacaaatggtcgtttgcatcatcatgggcacacgtgatgatctctatggagccatcaagaagctgtgctgcgtgcagtccccagtgccctcacaggtcatcaatgtccgaaccattggtcagcccaccaggcttcggagcgtggctcagaaaattttacttcagatgaactgtaaactgggtggtgagctctggggagtggatattccgctgaaacaactaatggtgattggaatggatgtgtaccatgaccccagcagaggcatgcgctctgtggtcggcttcgtggccagcataaatctcacactcaccaaatggtactcgagggtggtgttccagatgccacatcaggagattgtggacagcctgaagctctgcctggtgggttccttgaaaaagtattatgaggtgaaccattgtctcccagagaaaattgtggtgtaccgagatggagtgtctgatggccagctaaagacagttgccaactacgagatccctcagctgcagaagtgttttgaagcctttgataactaccaccccaagatggtggtgtttgtagttcagaagaaaatcagcaccaatctgtaccttgctgctcctgatcacttcgtaaccccctcccccgggactgtggttgatcataccataaccagctgtgagtgggtggatttctaccttcttgcccatcatgtgcgacagggctgtggcatacctacacactacatctgtgttctgaacactgcaaatctgagccctgatcacatgcagaggttgactttcaaactatgccacatgtactggaattggcctggtaccatccgagttccagctccttgcaagtatgcccacaagctagctttcctgtccggacagattttgcatcatgagccagccatccagctgtgtgggaacctgttcttcctgtaactgggaacttggacaccggctgcaaggagcaactggactcagctcagctcctccttacagaatcaacagaaatggcagtggaattttatgtttgcattttctctttctccatccttgtagaattagatttctgttcttcttttaaccctgatatcatagtagggtgttgtggtgcatgccttttatcccagcacttgggagactgaagcaggagtatctttagttcaaggccagcctagactacatggtgagttctaggctagccaagattacagagtgagaccctgtctcaaaaaacaaaaacaaaccactgtcccctcaaagcccacaacaaaaccaaagcctggggtcaaggaagcaagtttgtaggtagccgctggctgcccgctgccttcatggagtgtgtgccgtcagcgctgcttctcctcagccgagcgtggagcttcggacagggcagtgatgacatgttcttagcatgtcaaatccccctaccaaataagtcaagcaaggaaaaaatagcccccaaggcagcctgagcatcagttcctagaggttatgcctacagaaccatcctatttctggtggcagaagtgacatgaagtcattgcagacatcttaaaggagagttactgtgcagctgtctacatgtgtgaaagacatgtagaaaaaccagcgtagggtacagtcgggcgtatgtgcccacctgacccagggctgtgagtctgacttcccgagagtctggctagagctgcttttctggtccttttggttatttgcaaccatcatcagattgctttcctgcagcccgactgatacacgcatgtgcgcacgcacacacttttgttctttgtgactaatcttgaataaattcaattagaacacatggaaaggattcagcagacctaggaacatttggggtggagtgtagtttttctgcaaaagtctgtaaatgagattacgcaagagtctcttccagctgtgggctggtgttgcttggaaaatttcaaaatcccaaagtttcaggcttcccaaagttggcttggaaaaatgtgatagtctcacctgagtctagacatgtaggaaattttcctagggcctctgggcttcagtatttgggggaagcactggttttctgtgttatttttttccttctgtttcagaatcttcaagtttcttcaggcttcagtgggccatccctttactgggctctaaaagctaattttacttaaccttttcaaatgtgtatgtatctatttatgttttggtgtggtggatggatggtaggggactgagcagaaatagtcattttaaataacagtgtgctaggagagcctcagtgtgaagtcctgaggagcagcgggggctgtgggagtcagtgtcagccctcactcagacaggccaagcctgggctcgaagacaacattgtccagggaagcctttagtttgctatagcacccagaggttggcgaggaataagggttagggtcctcaaatacacccatggcttttggagtctatgaccaaggccaggctgagacctgaaatgtaaaagccatagaattaaacagaacagactgaaaaacgagtcttaagttccactttctggatttctctggaagtcttttgaatttgtctgtagaagttgctgttcctagcactccttttctctttaggtagaacagatacttgaccataatgccagaatgtactttctctgccttggtttttctatgccttgtttttcagtttcagggccaaacaattgggccctgtggtgtaaaataaaaacaatgtatgtgt

SEQ ID NO: 114 - DNA, 1530 bp, Mus Mus
cacgtgtaaaaagttcggcgcgggtcgcccagagccactcactcacctgagcgcctggccaccgcgcggattacctggatctgcgccctctccccatgtcccgccgcaaggccggccgcgtgcctcgccgcgtagatcccgataccgacaccgacattgagatgcccgatcttgtcatggatgtaaagccggacctcgacttgaggtccctggcgcaggggccctggatcgcgagggacatgcccatatcggatgtgaagcgtcaactccaaactgcctcgcgcccactcggcgcgcccagcacgtgtgccccgcggatgcctctgagttctaagtcttccgaccgccagccatggaccgacaagcacccagatctgttgacctgcggccgttgcgggaagatctttccattaggggccatcatcgctttcatggatcacaaaaaacaaggctgtcagcttctccaagtctccgaccccatctcagaatccaaagagctgaaggctctgagctgcctccagtgtggcagacagtacactagtccttggaagttgctgtgccacgcccagtgggaccatgggctatgcatctaccagacacaacacctagataccccagaggctccgctgctgggcctggctgaggtggcagcagccatgtcagcagtggcagtggtggcgccagttgaaagcaagccccctccagtgagcagtgctgcccggcggagccccacctgtgatgtgtgcaagaagaccctcagctctttcagcaacctcaaggtccacatgcgttcccacactggtgagcgaccctactcctgtgaccagtgttcctatgcctgcgctcagagcagcaagctcaacagacacaagaagacccatcggcagctggcacccgggagcccctccacttctgccagtagcaggggagtctccccagcagcccctcctgaaccagctgcctacgcagctgctccagccagcacactcccaagccagactgtggagaaggctggagctgcagccacagcaggagtccaggaacctggggcccctggcagcggagctcaagggggtccaggttttgttggctggggagcccctgccaaagtagagaggactgaccctgtaaagatcgagaagacagcacctaggaagagtcatgggcctgggggcaagtgtgagttctgcgggaagtccttcaccaacagcagcaacctgaccgtgcaccgacgttcacacactggtgagcggccctatacctgtgaccagtgtccctatgcttgtgcccagagtagcaagctcaaccgccaccgtcgcacccatggtctggggactggtaaaactgtcaagtgcccgcactgccttgtgccctttggcttgcaggccacactggacaagcacctgcggcagaagcacccagagatggcctgagccatattctctgtacaggtgtcactaaagcaagtggaaatgggcaggcactttagtcttttctctgtgtgaataaaccatctcctttttattctta

SEQ ID NO: 115 - DNA, 1475 bp, Mus Mus
agaggtgcagctgccaactgcatctgcgaagccaaggccatctgggtcctgttagagagcagacacaccatccagggagccactgggtatctcagaacatggcaagcagtggatacctgtatagcctggtggctgaagatggagtctggcaggcgtttgtatccaaggccaagttgtccagggagagagcagtggccctccacaaagctctgagggaactgacagcgctcttggccatagcagacagaggcagacttcaaaaaggtctgaaaggcagggagaagtttttgaaagtctttcctcgcttgaaagcagagctggtggagcatatcagtcagctccatgccctggctgaccacgctgagaaactacacaggggctgcaccatctccaacgtggtggctgactccttcagtgctgcctctgacatcctgagcctccttggtctctttctggcacctgtgacagcagagggaagtctggtgctctcagcaactggcttggggctgggggtagcagctactgtgactgatgttgctacctcaatcgtggaggaaacaagcagggttttggatgaagttgaagctgctccgactggcactcatgtgctgggggaggctggcacaagtgtggataggattgccagcaaggtccctcaggctaccagagacatcactagagacctggaagcccttgagcagcacatgaatgccctcaggctggttagagccaaccctcgtttagaagaagatgccaggatcctggccaccacaggaagcatctctgcccaacgggctatgcaggtgcgggccagtctgaaaggaacccctctggcaatgagcaatgaagcccggatccaacgtgccaccgccgcaggtgccgccctctggagtgatgtggacagccttgtcaaagagtcaaagcatctgtacgaagggtctgcgtcagagtcggctgaagcactgaggaagctggctcgagagctggaggagaagctagaggggctcatggaattctacaagacgatctgatcaggccccagtcagtcaccccatccccaagacaggcagaggtcaggggagaggacctggacagaggagagcaagactgcagtcaggtccgagggaccgagtgtgcaggcctgctgctgaacacagcacaatcaggtgagaccccctggtgcctgagacgagagactaaaggatgtgctgctgtgagagggactggaaagattgaactctggactaaacacggaagaagccagttaagagaaggactagaaagccctccccagctgagctactgcaaacaagaccccacaaaaggcaaaccagagagaaaggtgtgtgctctgtaaacacatcatgagccccatccctgtgctttagagcctgtgcttctccccagctccccagcccacgcccatcctcaggcatgtcattgtcccctaaataaaccgtttctgttgttcctca

SEQ ID NO: 116 - DNA, 4373 bp, Mus Mus
agtctgtagtcttcggagccggaggcggagcggtgagccaggccgccgaaagacgtgcacaccccctcagccagcgagcccgatcgggtgtccatggggctccgcctcggcccgacccccaccacgacccggaccacgatccccggctgcggcgcgcgccagtgacggccggccggccacttgggctctgcgagggctccgcgcggccccaagaggccttgtcgaggaccatggctgaacaacttcttcctcaggctttgtatttgagcaatatgcggaaagctgtgaagatacgagagagaaccccagaagacattttcaaacctaccaatgggatcatctatcactttaaaaccatgcaccgatacacgctggagatgttcagaacatgccagttttgcccacagttccgagagatcatccacaaagcacttattgacagaagtgtccaggcttccctggaaagccagaagaagctcaactggtgtcgtgaagtcaggaagctcgtggctctgaaaaccaatggtgatggaaactgcctcatgcatgcagcttgtcagtacatgtggggtgttcaggatactgacctggtcctgaggaaggccctctgcagcacccttaaggagacagacactcggaactttaaattccgctggcagctggaatctctgaaatctcaggaatttgtggaaacaggactttgctacgacactcggaactggaatgacgaatgggacaacttggtcaaaatggcatcagcagacacacctgcagcccgaagtggacttcagtacaattccctggaagaaatccacatatttgtcctcagcaacatcctcagaagacccatcattgtcatttcagacaaaatgctaagaagtttggaatctggttccaattttgctcctttgaaagtgggtgggatttatctgcctcttcactggcctgcccaggagtgttacagatatcccatcgtcctaggctatgacagccagcactttgtacccctggtgaccctgaaggacagtggacctgaacttcgcgctgttccacttgttaacagagaccggggtaggtttgaagacttaaaagttcacttcttgacagatcctgagaatgagatgaaggaaaagcttctaaaggagtacttgatagtgatggagatccctgtgcaaggctgggaccacggcacgactcacctgatcaacgctgcaaaattggatgaagctaacttacccaaagaaataaatttggtagacgattactttgagcttgttcagcacgaatacaagaaatggcaggagaacagcgatcaggccaggagagcggcacatgcgcagaaccccttggagccttccacaccccagctatcactcatggatataaaatgtgagacacccaactgtcctttcttcatgtccgtgaacactcagcctttatgccacgaatgctcagagaggcgccaaaagaatcagagcaagctcccaaagctgaactcgaagctaggccctgaaggactcccaggcgtgggacttggctgctcaaactggagccccgaggaaaccgctggaggacctcattcagccccacccacagcacccagcctttttctcttcagtgagaccactgcaatgaagtgcaggagtcctgggtgcccttttactttgaatgtgcagcataatggattctgtgagcgttgccacgcccagcagattaatgccagccacaccgcagaccctggaaagtgccaagcctgccttcaggatgtcactcggacctttaatggcatctgcagtacctgtttcaaaaggactacagcagagcccagctccagcctcacttccagtatccctgcctcctgtcaccaacgctccaagtctgacccctcacaactcatccaaagtctcactccacactcttgccaccggactggaaatgtctctccttctggctgcctctcccaggctgcacggactccaggagacagagcagggacaagcaagtgcaggaaagctggctgcatgtattttgggactccagaaaacaagggcttttgcactctatgtttcatcgaatacagagaaaataagcagtctgttactgcctctgcgaaagctggttccccggcccccaggttccagaacaatgtcccgtgcctgggcagggagtgcggcacactcggaagcaccatgtttgaagggtactgtcagaagtgtttcatcgaagctcagaaccagagattccatgaagcaagaagaacggaagaacagctgagatcaagccagcatagagacatgcctcgaactacacaggtagcctcaaggccgaaatgtgcccgggcctcctgcaagaacattctggcctgtcgcagtgaggaactctgtatggagtgccagcacctaagccaacgagtaggttctgtggcccaccggggtgagcccacgcctgaagagccccctaaacagcgctgccgggcccctgcttgtgatcactttggcaatgccaagtgtaatggttactgcaatgagtgctaccagttcaagcagatgtatggctaagtgcgaacacattgacaggtccagcaagaaggagcctcaaactgccattcacagtggtactgtgatccagacccctgagtgccacaggaagggtaggccctgggacagtggcttcaagtgtctttgagcaagtaggcaagataagctcttccttcgtcacagccatgaccatcaggttagtaaccgagactttgccctggtgagctgagagtagacctggttaccggcagtgcatgatgtcagggtcagcctgaagctattgctgctcgtctaccaggaggatgtggagatctttagacacgaaatgcgtgctaggactggcagcagttcctgagcctggctgccaggcaacaggaagaaaggcgtatgggaaagtaggatggagactggaaccatcctactgctgccagctggaagcttttctcagagagccaaagctgaattctcagagctccaaggccctccacaagatgctagaggaagctcagggaaaaacaggacgtaggcggagcacatctgtggtcaatgggcttccctatctgccgacttggctcccaaggttctgcaggaaagcagacctgcacacagatcccgtggctgctgaaaagacacatgttcacatggagacaaaccaagctgctcgctctcggctgtatgcaccttctagacagcagaacgtctggtgggaagacatgccagtgttggccattgtctcccattccaaagagaataactttgaactgagggtgtgtatcagagtatgtacatatgtaatatacccttatattatgtatgagggatttaaaatattgaaatggtttcctagtggtagtaggaagactgaataagaacaacctattttctggttgttgtcagcttgcccctgtctatacagcttgttacgtgaattcaacaagctgtcttcttaacgggagccctcattctggtttatttattatgaacttccaagttatttaaatgaagatttccttctgcagtattttcttgagataacatatttgctttccaccatgtcctgggggcctggttagtccctggccatggagtgtggtgggatggctgtcttctctctccttgttacctccctaggaaagaaggggttgctttatggataagcctgtagaatcggctgcttcctatgactccctggctgcacaagaagaaattgtctgtcttccatatatgcttctaagtatcctacctctttgaagaaaagatagggatggagtgaggtgacagtgggaagggacacaactacatggcctttcatgaccctggcttactgtgtaaatgctgtgcccttgggtactggataggaacactgagaaagcaaagccaatagccgtgaggacgaggaagtttctgccactgcttgcagcttttctgtgtgctttggacttgctttaggagggaaatatagctttgtagagataaaggctgacatctggggtctagcctagcacctgaagatacttgtgatgtctaactctgcatagccttttctcttcatatctgcggcctatcttttcccctgacatacgtctttgtccttctttcccaaagatgtcaaatacaatgcagcattttcatcttgttctttcaaagttaatagtctattattttatgtctattgattttcattgttaatgtgaaacggttatttatacttatagaaagtttgtgaaatttgcacagttgtctttcaaaggataggatctatcttttttggacttcagattgttttaaagaactgtaacttcacaaaagtcaatattaaaaaataaattatttaag

SEQ ID NO: 117 - DNA, 7386 bp, Mus Mus
atggcaggcttggtgttcctggggctcgcactgagcagtggagccactgtggctaagtcagaagggggcagcctctgctcaaggagccaggtgttcttcagagatgcttgctatgagtttgtgccgctggaacacaccttccccggcgcccagggctggtgtgaagggcacggaggccatctggccttcattcccgatgaagacacccagcagttcctgcaaaggcacattacccaggacagagaatggtggatcggactcacgggaggctcggggcacaatggcactgtgggaggctctgggacctggctggacacctcaaatgtcaactacagcaactggcaggaaggacaggccacacctgccccagggagctgcggctacatcgggagtggtccttcatctcagtgggctgccctagaggattgcacacagacctttgccttcgtctgcgagtttggggttggtcgcagcctggcttgtgagggacacaacgccaccatgcactgtgactcgggagaggtcattctagtccaggatgctttctacgggcaccagaccccctatttgtgcactcggggcatctggcctccctcagacctggagggagaatgtggctgggtcagcgtcaaggatgaggtggcaggccagtgtcaggggctgcaggcatgccaggttgcggtagatgggacctactttggagacccgtgccccaccaggggtagctacctgtgggtgcagtaccagtgtctagaaggcctgcggctggtggtgcccaacgggagcttcatctttgacaatgtcaccatctccctgatgtggctcctttctccctacactggaaacctgtcctgtgtactcagcatgggagacggctatacttttgacccctacaaccctcccagtgtgtccagcaacgtgacccaccagttcagctctcctggggagttcacagtgtttgctgagtgtacgaccagtgagtggcacgtgactgctcagaagcaagtgatcctttgcgagaaggtggagacgcctcgtatcactgggtgcactggcctggctggagctggagtcggccttctctgtcaggctgtctttggggaacccctgtgggttcaggtggatctggatggaggagccggggcgacttatgctgtgctttcgcataacagaactctggctgagttcaccgcccagaggggctcgcagctttacaatctgaccttggacagagacatccaggagatgctgggccctgggaggcaccacctaaagatccaagctgtcagcaatgaaggcaccggcactgcctccgccccctctggaaacttcactgtgtactttgtagagccgctgtcggggctgcgggcctcctgggcttctgaccgtgtggagcttgggtgggacttggtggtcaatgtctcagtggctcgtggcaccctggaggagctgaccttcgaggtggcgggactcaacgcgaacttctcccaggaggaagagagtgttgggcagtcatctgggaactaccacgtggcggttcctgctgaaggcaccttcctggtcaccgtacatgtgcggaacgctttctcagaactgagcttggacatcgggaacatcacggtcacagcctcttccagtctccaagaactgtcgggaataaatgctgaagcaaagagcggacacaaacaggacatgaaggtattcaccgagcctgaactgtacgtggaccctttcacagaagtcacactgggctggccggatgatgacccgggcttgaacttccactggtcctgcggacgttgctgggctcagtggaatgcctgcgtggggaggcagctgctccacacagaccagaggttgctggtgctccataccttctgtctgccaccgctcaactccgctgtcaccctgcatttggctatcctaaggggccaagagctggagaaagagacagaacagtgcctctacgtgtctgctcccttgaaccttgggcctcaaatcagctgtgagaagaactgccggccagtgaaagccgaccaagacgttctgctcactgtcaccgtgggagatgagacctcggtggccgtgttcagctggtacttagatgacaccgtaccagaggaggctgagcccctcccagctgcctgcagactccgaggattttggccacgatcactgaccctccttcacagcaactcctccgtgctactgctgaacagcagcttcctgcagacctggggacctgttattcccatccgggtcacagcactgaccagccacgcctacggggaggatacctacatgatcagcatgctacctcgacctgaagtgcctgcctgcacgattgacccggaggaaggttctgtgctgacgagcttcactgtctcctgcagcactcccgcaaccctgggccctgtggagtactgcttctgcctgccctcaggtttctgcctccactgtggccccgaaccagccctccctgctgtgtacctaccacttggagaagaaaaggatggctttgtcctgccagtggtcatctctgttaccaatcgggcaggggacatagagcagacccaagtggcagttaaggtgggacacagttacacgggtgttgaagatgtgacattccaggagatggtgtcagagagaatcgccacagctctgcaccaagagagtggccgtgaacagcttctcctgtttgccaaggctgtgtcctctgaactcaactcggaggtccagagcccaggctctgggcaacttggaatggacatcaagcggaaggtcagagagcttatgctgcgatcactgtccgtggtcaccaccggcctgcagaacatgcagagggtccaggctttggctgaggtgctgagggaggtgactcagcgtgctgaggagctcacacctgcggcccagtgggaagccagctgtgctctgcagcgtgccactgaagccctgttggtagccagtaccaaggttcgtcctgaggatcagagacgccaggaggctaccagggccatgtttgaggctgtggggagtgttctggaagcttcgctcagccacagatcagaagagcccatggaggctaacagcagccaggcttacattgtggcccagctgcttcgggttatagaccattttcagagtgcccttctgctggggacattgccaggaggccttccagccatcctggtcaccccttccatctctgtatacacagacagaatacagccacggagttggcaaggctcttcagtgcacactgctgccgctgactctgtgaccttcaccctgcctgctgccaccttcctctgccctatggaggacagccaggagcctgtggacataaggatgatgagtttctcacagaaccccttcccttcccgaagccaatttgatgtcagtgggactgttggtggacttcgcctgaccagctccagcggccatcccatcccagtgaagaacctgtcacagaatattgagatcctgctgccccggatttcagcacacattgagccgaagatgctgagcctggcctcccgtgaagctctgtcagtgaatgtgacagcaggggacacagctttggggattcagcttcattggggacctggagtcccactcatactcagcctgggctatggctaccatcccaatgagaccagctatgatgcccaaacacacctgcctcctgtggccgccacaggtgatcttcccacctggatcctgcacccagaggacctgcccttcggagaaggagtctactatttgagggtggtccccgaggctgatctggagtctagctctggcaggaacctcacagttggcattaccaccttcctggcacattgtgtcttctgggatgaaacccaggagacctgggatgactctgggtgccaggtgggcccacgaaccaccccctcccagacacactgcctttgcaaccacctcaccttcttcggaagctccttcctggtgatgcccaacgccattgacgtccgccagactgccgagctctttgctacctttgaggacaaccccgtggtggttaccacagtgggctgcctctgcatgctgtatgtgctggtgctgatctgggccaggaggaaggacatacaggatcaggctaaggtgaaagtcgtagtcctggaggacaatgatccctttgcccagtatcactacctggtgacagtctacactggacaccggcgaggggcagctacgtcttcgaaggtgactctcaccctgtatggctcagatggagagagtgagccacaccacctgtcagaccccgatgctgcggtttttgagcgaggaggggttgatgtcttcctgctttccactctgttccccctgggagaactgcagagcctcaggctgtggcatgacaactctggggaccggccatcatggtatgtgagccgggtgctggtctatgattctgtggtggaccggaagtggtatttcctctgcaactcgtggctgtccgtcgatgttggagactgtgtcctggataaggtgtttcctgtggccacagagcaggacaggaagcagtttagccacctgttcttcactaaaacctccacgggcttccaggacgggcacatctggtactcggtcttctgcagtgccactcggagtagcttcacgcgcgtacagagggtgtcctgttgcttctccatgcttctctgcaccatgctgaccagcatcatgttctggggtgtccctaaggacccagccgagcagaagatggatctgggcaaaattgagttcacttggcaggaggtgatgatcgggttggagagctctatcctcatgttccccatcaacctcctgattgtccagatcttccggaacacccggcctcgtctcccgatggggaaggatgggagacagaaacagggaccccctaacctgactccctcagcgcagcccacggaggagggacttctgacacctgaaacaggtatacagagtctcatcagctcactgtttaaagccctgaaggtgcaacccccagcctcaggctgggactctatgaacccggtggacattaactacctcctcactttaatggaggacatcatctgtccggagagcacagagggaccggggttctgggaggaagccaaagggagagaggaccctatcacctccacgcgtgggtctgtgaaaccgaaagagaacacgtggcaccccaagcctgagctggcggtacgtggcctttggaaggacagcgtctacaggcggtgtctctaccttcagctggagcatgtggagagggagctgcagctgctggggccccaaggcttcctgcatcaccacagccacgctcaggccctcagacagctacacgtcctgaagggtcacctctggggacagcctggtaccccggcactggcatatcccagcacgtctcgggtcagcaagtcccctcgtggcctgccctggtggtgtgtcctagtcggctggctcctggtggcgaccaccagcggggtggcggccttcttcacgatgctgtacggcctgcactatggaagagtcagctccctcaagtggctcatctccatggctgtgtcctttgtggagagtgtgttcatcacccagccgctgaaggtgctgggctttgctgctttctttgcgctggtcttgaagagagaagatgatgaagagaccttgcccttatttccaggacatctgtctagcccaggtcccggtgtcttgttccgatcacggaggcacagcagcgagcgtgcttaccagcctcctcccatggctgccatcgagaagatgaaaaccactcgcctcaaggagcagaaagcatttgctctcatcagagagatcctggcctacctagctttcctgtggatgctgctgctggtggcctacgggcaaagggaccccaatgcttaccacttccaccgacatctggaacgcagcttcagtcaaggcttttcgcctgtcctgggcttcagagggttcttcgaatgggccaacaccacactcgtgaagaacctatatggccatcacccaggctttgtcactgacgggaactctaagttggttggcagtgcccacattcgccaagtgagggtccgggaaagctcttgcgctgttgcccagcaattacaggattctctggatggatgccatgggccatactccctgggtattgaagacctggtagactatggagaaggctggaatgcctctgcctacaataacagcaatggcttccctcaggcgtggcggtaccagagccagagccaacgccgcggttatcccatgtggggcaaacttaccctgtacgggggaggaggctatgtggtccccttggggactgatcaccaaagcgcctcaaggattctccagtacctctttgacaacagctggctggatgccctgaccagagcagtgtttgtggagttcactgtctacaacgctaatgtcaatctgttctgcactgtcacactcacactggagactagtggcctaggtaccttcttctcacacgtgaccctgcagagcctgcgcctgtaccccttcacggatggctggcatcccttcgtggtggcggcagagctcacttactttctctttctcttctactatatggtggtgcagggcaagctcatgaggaagcagaagtggggttacttttgcagcaagtggaatcttctggaagtggccatcatcctggccagctggagtgccctcgtggtgtttgtaaagagaactatcctggcagatcgcgacctccagcgctaccgggagcacagggacgaggggatcagtttcagcgagacagcagcggccgatgctgctcttggttacatcatcgccttcctcgtcctgctgtccacagtgaagctttggcacctgctcagattgaatcccaaaatgaacatgatcacatcagcactgcgccgtgcctggggtgacatctcaggctttgtcgccgtcattcttatcatgctcctggcgtattcctttgcgtcaaatttagtatttggttggaaactccgttcctataaaaccctctttgatgcagcagaaacaatggtcagccttcagctggggatcttcaactatgaagaggtcctggactacagcccaattcttggctccctcctcattgggtcctgcatagtttttatgacatttgtggtactgaatctgtttatctctgtcattctggtggccttcagcgaggagcaaaagtctgaccagctgtgggaggaaggagagattgcggacttgctcctggtgaaaatcctcagctttctgggcatcagatgtaaaagggaggagacttggagcagcagtgagcagccagagttgcccccccaggctctggctcctcagccagcacaagctttgtcccgggtttaa

SEQ ID NO: 118 - DNA, 1990 bp, Mus Mus
ccacgcgtccgctgggattggtaacctggagttaagcgggctccctgccaacgcgagggctttaaaaggggtgatgcaacgcgctcccagccacagtctcactcagcgagacgccgcgcacagtgcttccccagtggagccaatcggctaacccgcgctccggcagagtccttggcgctcgcccgccggcgggacagaccacccgcctctggccgttctctggaccctggccgccccgagcgaagactggagcaaaatgatgcttcaacatccaggccaggtctctgcctcagaagtcagtgcgaccgccattgtcccctgcctctcacctcctgggtcactggtatttgaggattttgctaacctgacaccctttgtcaaggaagagctgagattcgccatccagaataaacacctctgccatcggatgtcctctgcgctggagtcagttaccgtcaacaacagacccctggagatgtcagtcaccaagtctgaggcggcccctgaagaagatgagaggaaaaggaggcggcgagaaagaaataaaattgctgctgccaagtgtcgaaacaagaaaaaggagaagacagagtgcctgcagaaagagtcagagaaactggagagtgtgaatgctgagctgaaggcccagatcgaggagctgaagaatgagaaacagcatttgatatacatgctcaacctgcaccggcccacctgtatcgtccgggctcagaatggacggacaccggaagacgagaggaacctctttatccaacagataaaagaaggaacattgcagagctaagcagaggtggcacggaggcaattggggagttcttactgaatcctccttttccaccccaaaccctgaagccattggaaaactggcttcctgtgcacttctagaatcccagcagccaagagccgttggggcaggagggcctgtggtgacctactgcattgtcccactctgaccccgagtgaaccgtggagcaggcaggagcatcctttgtctcaccaattccaggatttaggccttatcatcccggccagtctcagatgacctagctggcctcaagctggggtcctatgcaaagcaggatcccactaatggattcaggcagaagtgtctaccttgataggtggggtgggaccacatcctccactgtggctgacaacgcccttccaagggaatatggaatgagaacattcattattgaggttgtccaatggccagggtatgctttctagaaaatatgctgttctgtcccagaatgactgtgcatagagtatccttttcagagcctggtgttgtgctatttagatgtttgtcttgcacaacattggcatgatttttccgggagtttcatcagatctgatttctgagagtctggggatctgccatggtggaaagtgcccctcaaaagcatttgtgtggccacatgaactggctggcaccaggggagtgaaactggctgatgaccagctgagccactttgtgccaacagaggatggacgacacctttccctgtacccactgcagaggaagaaccctgggcacagcagctttgtccttggctacaaactgttacaacgtcacacaatgaaggcacaaagtccaactttcaaagggtgtaggactccatactcagtgacagggcaggaagagccaaagataaccacagccacagcctgtggagaccagggttggaagccaggtgcagggccaggcatctgcattgtgggatgttaatggcacttttgtcttgtagctattttgagatgtggtccagagcatttcagctgggagatctccctctggccaccaggactctggctactgttaaaatcctgatgtttctgtggaatcctcagtgtttaatcctactcaatagtatcattacagttttctgtaagagaaaatattacttatttatcccagtattcctagcctgtcaacataataaatatcggaacaaaacctggtaaaaaa

SEQ ID NO: 119 - DNA, 781 bp, Mus Mus
gatgggtatttgtttccgggatggtaacagctggtgcctgcaggtccaagcagccattcttgcctgtggattcagagccccaggcctgaccacagtgccagaaactgccaccccctgccctaaaggagccccaaggctgctgtgagcatggcagaagctcctgttgacttgagcacaggagacaatctggagcaaaagatcctgcaggtgttgagcgatgacggcggccctgtgaagattggccagctggtgaagaaatgccaagtgcccaagaaaaccctcaatcaagtcctttaccgcctgaagaaggaggacagagtgtcctccccagagcctgcaacatggagcataggcggggctgcttctggagatggggctcctgcaatccctgagaactccagtgcccagcctagccttgatgaaagaatattaagattcctggaagccaatgggcctcacagggccctgcacatcgccaaggctctgggaatgacgacagccaaagaagtgaacccactcctgtattccatgagaaataagcaccttctgagctatgacggacagacgtggaagatctaccactcacgtcaggaaggccaagacatagtcttgccatgtagccctggatgtcctagaactcaccatgtagaccaagctggtcttgaacccacagagatcttcttgcttctgcctattaaattctgggattaaagcaccactacacctggaaaaatatcttttaaagccagtaaaataaatgaacaattaaagaatgcatctc

SEQ ID NO: 120 - DNA, 527 bp, Mus Mus
ctaaggctgtttaatctttacaatgtctggacgcggcaaacagggcggcaaggctcgcgccaaggccaagacccgctcctcccgggccggcctgcagttccccgtgggccgcgtgcaccggctgctccgcaagggcaactactcggagcgcgtgggcgccggcgccccggtctacctggcggccgtgctggagtacctgacggccgagatcctggagctggcgggcaacgcggcccgcgacaacaagaagacgcgcatcatcccgcgccacctgcagctggccatccgcaacgacgaggagctcaacaagctgctgggccgcgtgaccatcgcgcagggcggcgtcctgcccaacatccaggccgtgctgctgcccaagaagaccgagagccaccacaaggccaaggggaaataaaaccctttatacaaagcactgttgatcgccaacaaaggctcttttcagagccacctaaaaaaaaaaaaaaaaaaaaaaaaaaaaaaaaaaaaaaaaaaaaaaaaaaaaaaaa

SEQ ID NO: 121 - DNA, 3496 bp, Mus Mus
gtttcagcactgctcacccaagggagacagcacagagagatagccaatgctgctcaaaaaacaactctgagagtgtcctaatcactagtgccttcctttacaccccacgcttcagtttctcatttactacctgatctacctacctactcgagccaagcaggccacttcttgtgttgttgaaggtctcaggatctgtacatcgcagcagaaatatccaaggaggctcacaaacaacttgaaagatggtgaaagaatataagagaattgttctgctgaaaggacttgaatgtatcaataagcatcattttagcttatttaagtcattgctggccagagatttaagtctggaaagagacaaccaagagaaatactccacaattcagattgctaacatgatggaagagaaattcaaacccgatgctggattgggtgaactgatcgagttttgtgaaaaagtaccagctcttagaaaacgtgctgaaattcttaaaaaagagagatcagaagtaacaggagaaacatcactggaaaaaaatggtcaagaagcaggtcctgcaacacctacatcaactacaagccacatgctaacatctgaaagaggagagacttccgcaacccaggaagagacttccacagctcagggggagacttccacagctcaggcggggacttccacagctcaggcggggacttccacagctcaggcggggacttctacagcccagacaaagagaaaacaaatcacaaaaagtgaaggtgaaaagaaaaagaagctcacccaggagcaggctcagctttcagaacctttaggaaccgatagaaaaaaagatgaagattgtctccagactcctcttatggcaccaccaacaccacccagcagttcctcaaacaagaaacagaaaaacacaaccatcccaaaacatggtatcataaagacaaggggtcctcaggaaattcatcaacttgtagaattttcatcatccagcaacttcccagctgtaagtgaactcccgacctttgaaggactttcagcaattccttctagcagacttcagtcttctcagaagcctctagaagctcacttggatttaaagatgtctccaagctcttcaagatcaccttgccataatctttcagtgtctctaacgtcagactcaaatgttcatctgaactctaatgcacattccatccagtccagtggtgcccaggttccttatgtaccatcagcaacaggattcagtaatgtcagggttcctcttatgccttcaaaaacagtgtcctgctcttccattgctcctcacatgtctttaataaaggtacccagcagtatccaggaccttcaccttcctacacaagaagcattcagtagcacagaggatcctcacaatcaagcaatagcatccaaaaatctccaaactactaaaatgcctccaacaacactgacaagcaaagcccagctcctaaagatgccttcttcagcaacatcatccagcagtgttcaggtttctcatactctagcaactgtgtccagaagcacctctgtcaaacagatacttcaaacaacaagatccagtagcattcagattcttaactctgctacagtaaaagcatccaagaatgtccaggcctctcaagtatctttaccaacagaacccaattatttccaggcttctgtggcacctccatcagcaacacccagcagttctacatctcttctggtacctttgtcaaaagccacaagcagagcccagagtactcaaattcatccagaaagagaatccatttgtgtccaggctcatcgtgctccttcatcaacagtgtccagaaataagtgcaccactcagttgacacaaggggcagcatccggtactgggaaggccttttccctccctgaagtaaaagcatccatgaaagtccaagcacctcaggtgtcttccccaacagcatccatgagtatcctgaatccaaatgcaacccccccaacaacatccagcaatctcctggctccacatgcaacttcatcaacaacatatagcatcctcctggctccatatgcaactctatcaacagcatctagcaacctcctggctccacaagcaactgtatcaacagcatctagcaacctcctggctccacatgcaactctatcaacaacatctagcaacctcctggctccacatgcaactctatcaacaacatctagcaacctcctggctccacatgcaacttcatcaacagcatctagcaacctcctggctccacaagcaactctatcaacaccatccaatagtctcctggctccacatgcaactctatcaacaacatctagcaacctcctggctccacatgcaacttcatcaacagcatctagcaacctcctggctccacatgcaacttcatcaacagcatctagcaacctcctggctccacatgcaactctaccaacagcatccagcaatcttctggctccacagttgtgtccagtaacagcatctagggctctcagtgctattccagtgccttcagcaacagtacacagcagtccatcctggacaccaaggagaggaactgtaccaaaggagccttctagggaagaaggtcaccatcaaggtcccaaacaagtgatggtgctgaaagtaacagaaccatttacatatgacctggaagaagataaaaggatgtttcatgctacagtggctactgaaactgagttcttcagagtgaaggtttttgacacagctctaataagcaagttcatcccaagaaatatcattgccatatcagattattttgggtgcaatggatttttggagatatacagagcttcctgtgtctctgatgtgaacgttaacccaacaatggtcatctcaaatacactgagacaaagagctaatgcaactcctaaaatttcttatcttttctcacaagcaaaggggacatttgtgagtggagagtacttagtaattaagaaaactgagaggaataaagccatttactatggagttaaagataatacagggaaaatggaagtgatggtttatggacgactcaccaatatcacgtgtgaaccaggcaataaacttagacttgtctgctttgaattgaatctcattgaagatgggttgcagctgaagtctgtaaggcacagttacatgcaggtcatcaatgctagaaggtgaaggaaagccactcaacccagactcagtcaggggaacctctctggaaccatacttctgaaaacctggatgccaatgacattttttgtggagataagattcaagtacagaaaataaaagtgcataggcctgttgaaataccagctctactaaaagcagctcttaattctaagaaatggggctttcttatatgctttacacattttctattatcaaagttttatatgttgtctctataacttctgtgattgtttaatttgtaatttttatacctaaaacttaaaataaattcacacaatttctgtaaaaaaaaaaaaaaa

SEQ ID NO: 122 - DNA, 1540 bp, Mus Mus
gaccagaggcggttgaggaccagtggtgaggaacggccgaggcggcgtctgagcgggtctccggagttcagcatgcgtgagtgtatctctatccacgtggggcaggcaggtgtccagatcggcaatgcctgctgggaactgtactgccttgaacatggcattcagcctgacggtcagatgccaagcgacaaaaccattggcggcggggacgactcattcaacacattcttcagtgagactggagccggcaagcacgtgcccagggcagtgtttgtggacctggagcccactgtggtggatgaggtgcgcacgggaacctaccggcagctttttcacccagagcagctgatcactggaaaggaagatgcagccaataattatgccagaggccactacaccatcggcaaagagattgtcgacctggtcctggatcgaatccgaaagctggccgatctgtgcacgggactgcagggcttcctcatcttccacagctttggaggaggcacagggtctgggtttgcatcgctgctgatggagcggctttcagtggactatggcaagaagtccaagctggagtttgccatctacccagccccccaggtttctacagcggtcgtggagccttacaactccatcctgaccacgcacaccaccctagagcattccgactgtgctttcatggtggataacgaagccatctacgacatctgccggcgcaacctggatattgaacgtcccacatacaccaacctcaatcgtctgattgggcagattgtgtcgtccattacagcctccctgaggtttgatggcgccctgaatgtggacttaacagaattccagaccaacctggtgccataccctcgcatccacttcccactggcaacctacgccccggtcatctcagctgagaaggcataccatgagcagctgtcagtggcagagatcaccaatgcttgcttcgagccagccaatcagatggtcaagtgtgaccctcgccacggcaaatacatggcctgctgcatgttgtaccggggggatgtggttcccaaagatgtcaacgcggctattgcaaccatcaagacaaagcgcaccatccagtttgtagattggtgtccgactggatttaaggtgggtattaactaccagcctcccactgtggtccctgggggagacctggccaaagtgcagcgggccgtgtgcatgctgagcaataccacggccatcgcagaggcctgggcccgcctggaccacaaatttgacctcatgtacgccaagcgagcctttgtgcattggtacgtgggagaaggcatggaggaaggggagttctccgaggcccgggaggacctggcagcgctggagaaggactatgaagaggtgggcgtggattccgtggaagcagaggcagaagaaggggaggagtactgagcgcatgggtctggctggcggccgtccatttatgtcttccccaccattggaaataaaggatatattattaaaatttctagactgtaaaaaaaaaaaaaaaaaaaaaaaaaaaaaa

SEQ ID NO: 123 - DNA, 2648 bp, Mus Mus
gctgagaaacagaagtagactcaagccaagagcacaccgagggctattcttctctggagcagtgagtgcatccactggacacaggattttctgtgcagcagatttactgtaaactccagtggaagctagactggaggaaaagatgacccactgtttaaagtttctgctataacctgctgcggagcaattctaggatttgttgtgcctttattgcttgaagtgatgggtcaactgttctcttcacgtaggagtgaggaccaagatttgtcctccagctttattgaatacttaaaggaatgtgagaaaggaatcaatatcattcctcatgagatcatcacttcgattgaaataaacatgaaaaaagggaacattcaggaggtaaactctacagtcagagacatgttaagagaaattgataataccccgctcaatgttgctctcaccggggagactggatcagggaagtccagcttcatcaacaccctgagaggcattgggcatgaagagggaggtgcagctcacactggggtgacggacaaaaccaaggagagacatccatacgaacaccccaaaatgcccaatgtggttttttgggacctgcctgggactggaagtgaagatttccaaccaaaaacttatctcgagaaaatgaagttctatgagtatgacttcttcattattatttcggccacacgcttcaagaaaaatgatatagacctcgcaaaagcaatcggaataatgaaaaaggaattctacttcgtgagaacacaggtggactctgacttaagaaatgaagaggatttcaaacctcaaacctttgacagagaaaaagtcctgcaggacattcgtcttaactgtgtgaacacctttagggagaatggcattgctgagccacctatctttctgatctctaacaaaaatgtttgtcactatgacttccccgtcctgatggacaagctgataagtgacctccctgtcttcaagagacaaaattttatgttctccttacccaatattacagattcggtcattgaaaagaagcgaaattttctgaggtggaagacttggctggaaggctttgcagatgggctactgagcttcttcttagaaagtgatttggagactctggagaaaagcatgaagttctaccgcactgtgtttggagtggatgatgcatctttgcagagattggctagggcctgggaaatagatcaggtagatcaggtgagggccatgataaaatctcctgccgtgttcacacctacagatgaagaaacaatacaagaaaggctttcaagatataatcaggagttctgtctggctaatgggtacttacttcctaaaaatcattgtagagaaatactttacctgaagttgtatttccttgacatggtgactgaggatgctaaaactcttcttaaagagatatgtttaagaaactagttgctaccgggcactggtggtacatgcctttaatcctagcactggggaggcagaggcaggtggatttctgagttcgaggccagcctggtctacagagtgagttccaggacaaccagggcctacaatgagaaaccctgtctcgaaaaactccaaaagaaaaaaaagaaaaagaaagaaagagagagagagagagagactagttgccttctaattaggctgaagtcctgtgactttcaaaaaatcagaatcaataaacagaaaaacaggacactgatactgtaaaacaatatactgggtttatccaggttattcgggctttatccatatttagtgattatgtatccacattacctagataaaggggatcagatatgtataaataaactgatagctaaaaactatcccctcactttgagtaaactttcagatcaataattttacttacatttaaatttgtttaatataaatcgacatccaagttcagggttagcattgaagtgtttagtattgtcaactgaacagactctagagtcacatgaaagatgagtctgggggattgcatttgggaaattattttgcttatgttaattgaggtaagaaatcctttccactgtgggtggcaccattccctagctggcaattgtcaactgtgtatatggagagaggtggtaagtaccagcgtatttccattctttcatagccctctggtggtttttgttgttgtttgttttttattgttgatttttaactatagatggtatgacactagctgccacaagatactgctctgccttcttgaaaattacctatataaccttaaacttgatactgtagactttcttgatagagattttataagagaaaccttaagtgggttggagagatggctcagtaaataaagtagaccttgcaactatgaagacccgagttcagattcccagaacccacataaagccagctaagcatctgtaatccatgcaattctattgtgagatgggaggcataacgagaaatattttgggagatcatggggccaggtatcctgccacatgcagcagtaaataagaggccctgactcaagcaagtggaaggtaaaagccaacacgaaagcttgtcctctgatctctgcatacatgccatgtcatgttcatgcctgatatcacacatggatatgcacacacaaaaaagaaattttttttcattcc

SEQ ID NO: 124 - DNA, 1582 bp, Mus Mus
gagagcttgctggagaagggacagggagtgtttccagacagctagaggagacaacggtctcctaaagcctcctgtcccaccagccggccatgatgacctgcccttcagtgcccgctatccctaccctctggctgttcagcatcctgctcctggtggtctccctgaatgctcagaataaaagctgggacaaccctatctgcacggagggcatcctgtctgtgcctcgaggcaatcctgcagtgatgacctgtaacatctctaacaccttcaccgatgtcaccatccagctgtctgccaatggaaaggacaagaccatcttcgataaaaagccccaaggaaacttctcttggcgtgggtgggagctccaagttcaaggggggcaggcacagcttgtgatcaaagacacccaggacgaccacacagggatatacttgtggcagctgcatggacgccagagatgctacaaaaacatcaccctgaatatcttagagccttccaacgaggacaaggtcccagacactacgctctttacatccttcccagatcacgcgaagagctctccaatagagggcaagcctgggacccttgtgggagtcatcactgtcatcttcatcttgggagtcgccggattcattacgtttatctactacaggcaccgtcgttcctagaagccccagatggaatgtacctcagtgcctgacttgaggtaaggtggttccaggtctgtggccagtggaagctgaagggagctgcctgcagggttgagtccagagtgagaccaccagcatgggcttatgttctaagccctaggagacctctgggactgcagacaccatggaagtcatcattacgcgcttggcagagcacatggctttgttcagtctgctgggcacaaagtcctttccctgagggcaatggaacccttggctctgtacagatcaggggacagtgattcactgaagaaggaccttggaagctggaaaacaatttaggcatcttttggtcacatgaacaagagtacagcctcctgactatggtcttcagacatctgatccattcctcaactcttccccaaattgggaattcccagccgcacagctcttgacgatcggcataggcttcattatttctgctaaacctctgaggttagggtctcactaccacccaaagagctccagtgtaagcctgatgctgcaccaagatttgcttcaggtacaacttgggggcgtacctgatttctgactcacaacagaaacgagttcgggaagcccagatgtcaggttccaggggccaaaatagggagctaagactttcagatgaatcatctccccactcccacccctgcaaggcagagtgctgtcaggaacaggggtctgtggaaggatgtagtgttggttggcaggcattgctctcctgaggatcatagagcatcttgagattccctgggggcttctcttcagcagactcctgagccccaactccctgattcaacagccactacccactgttcttttctaaacttttgtcctagttacaatgttattttttcttacaattaaaaaatgatttttgtagaaacttc

SEQ ID NO: 125 - DNA, 3949 bp, Mus Mus
agtgatgtggggacccagcgagatggagctcactttaggaaacagcggggagtcccccaaaggactaaggtattccagccacacccgactaacgctgcaaatatgtaggaaagagagtgaagcaagatatttttaatgagtagccctgtctagtagtagatccctcaaagcaccaagtgtgggtaggggttacatccggcacccggcagtcaggagtcattggccacgcacccttcgccagcgtccattctgccgaaaagcaagttctggccttctgcagttaatgcttttttacccatcagcaagatgcaccaagatgagacttagaggtgctgcacagaagcaggaaaaggaaccagctgctcctatatataggtctggagcacttcattagaaggcagaggaagaggttgcctggagagtggctgcagccctgctttgagcgctttgacacagcagacagttacacagcagtcatgagtacaacgagtaaggagtcactggagagcaatctgcgacagctaaaatgccatttcacctggaacctgatagcagaagatgagtccttggatgagtttgaggacagggtgtttaacaaggatgagtttcagaacagtgagtttaaagccaccatgtgcaacatactggcctatgtaaagcactgcagaggtctaaatgaggcagcactgcaatgcttaggggaagctgagggcttcatccagcaacagcatcctgaccaagtagaaatcagaagtctggtcacctggggaaactatgcttgggtctactatcacatgggccagttctcaaaggctcaggcttatctggataaagtgaaacaggtctgcaagaagttttccagcccctacaggattgagaatcctgctcttgactgtgaggaggggtgggcccgattaaagtgtaccaagaaccaaaacgagagagtgaaggtgtgtttccagaaggctctggaaaaggacccgaagaacccagaattcacctctggatgggccattgcgaactaccgtctggatgactggccagcaaggaattactgcattgactctctggagcaagccattcaactgtctcctgacaacacttatgttaaagtcctcttggcactgaagcttgacgcggtacataaaaaccaagcaatggcgctggttgaagaagccttaaagaaagacccaagtgcaatagatacactcctcagggcagccaggttttattgcaaggtatatgacacagacagagctatacagttgcttagaaaggctttggaaaagctgccaaacaacgcctatgtgcattactatatggggtgctgttataggtcaaaagtccatcatatgttgaacagaagggaaatggtatttagtggggataggaagaagttagaggaactaatacaactggcagtgaatcacttacggaaagcagaggaaatcaaggagatgcttgaatattcctgtagcttccttgctgatctttatatcatagcaaaaaagtatgacgaagccgattactacttccagaaagaattgagcaaggacctccctcctggccctaaacagttactccaccttcggtatggcaactttcagttttttcaaatgaagcgtcaagacaaggctatctaccattatatggagggtgtgaaaataaagaagaaaacaatcccccaaaaaaagatgagagagaaacttcaaagaattgccctaaggcggcttcatgaagatgagtctgattctgaggccttgcatatcttggcatttcttcaggagaatggaggaggtcagcaagctgataaagactctgagaggggagtggactctgcaaaccaggtaccttcagcatctttggatgaagcaggtgctgaatactagtgatgtggtacccggcctactgctggaaggaaaaagaaagccctcaccaagctgccattcaaaatacttaaccacttcctggatcaagaatgggctatcatactgactatagtatttgtcaggagtttggggaactctgctatcagattctagcacctgagtttctggatcgtgggatggtctgggagagggaccagatgaggtgatagatacaggatcttggcaaacagcctagagctctttcaatttttttttggaaaaatagtttccacagtagtaaattctttaatcacacccacccctcagtggaggcttgtcttgggcttgtttcagtatttgtataaagcagccaaattcctcacatgggtgaatgttccatccttgaattattttagatattgcacagcattttcttcatagataatagtgtccatcaaaaagctgaggagtcagagactgtggctcaggactgtaatcctagcacttggaatctgagacaggaggattacagtgaacttgaggtcagcctgagcatgacctggaagggatggtgggaggtgagaattatatgtataaatattaatgattatgtacattaccttgttagtttgggtgagtatatgtctatataaccactatcacatatatctaaaaatacagaagggagaggttttgctttattgaataactttaagacttaccaaataatgttcaatattaattgagctcaaaatataaattgaatagtgagtcccaggtctggaagggatggtgggaggtgagaattaaatgtgtaaatattaatgattatgtacattaccttgttagtttgggtgagtatatgtctatataaccactactatcacatatatataaaaacacagaagggagaggttttgctttattgaataactttaagacttaccaaataatgttcaatattaattgagctcaaaatagaaattgaatagtgagtcccaggtctaaaaacaaacaacaaaagttgtgggaccaagtcattcctccaattaccagccagttctcaatctatggtgtcccacacacatgagttcaactgttccattagctcaggtggcagcaggattcgaaaaactgaggacagggtgagtcagaagggtcacatctgtgcaaagcagtagactcaggcagccacaccagacttccaggagtcgcatgggaagatgtctccctactctgccctcctagaactatatagttgtaggaaaagaagggagattctgtctaccaccatgacaattcatataaacatttatttcaagagtatggaaacaccagtggggatgaagggattgctgatttatacgcgatgattataaactcatgaggaaaaagtttatagtcactgttaggaagatttctctgtcaaataaataatttattcagaaatgctataaagaaatgccaggaagacagctgcctagaaggataacttggattgatgcttgggtcaagggactttgaaaatgtcatgggtactggagttgagttgttttattccatgtgaaatgtgtcacaccaagggatataaataatttttataactctgaaaaaaaatacagaaacaccacaaacttgataattgccatttcctaggtagatctggaagggcctaaatgttaaggttggtgtgaattgacagagtcaagtggcccagtatgagacggtcagccacactctgggataaaaaaatgtttctctactgggttcagcttgtctctatgtatatatgaacattttattcagcaattaaaacatccatgattcatagattgttaaaactaaacattctaacagctgtatcagtgcttcataatattttaaaaatgaaaatattctctatgcattaagtccatcgatattcaccatttgaatttctggaaaaataataaactttgtttataagtaacacataatgtaacattaagctatgctctggttcccctgaactttactgtaccttcgtatttttagactcaagtactgataataaagagtgcattaactgtttgttcttttta

SEQ ID NO: 126 - DNA, 2471 bp, Mus Mus
aaaatctggaacttcccgggttactacagggtctatgtcacagtgcctgtgagagaggacagagcactctgcagccagcctcagaggcaaagctgaccagcattgaaaagctgcttcttcttcttctctaaaggatttctcttcagagacaaaaagaaaccaccctggacatggcctcagagatccacatgtcggaacccatgtgcctcattgagaacactgaggctcaactagtgatcaaccaggaggctctgaggatcctgtctgccattacacagcctgtggtggtggtggcaatcgtgggcctctaccgcacaggcaaatcctacctgatgaacaagctagctgggaagaggacaggcttttccctgggctccactgtgcagtctcacaccaagggcatctggatgtggtgtgtgcctcaccccaagaaggcagggcaaaccctggttctgcttgacactgagggccttgaagatgttgagaagggtgacaaccagaatgactgctggatctttgctttggcagtcctcctcagcagcaccttcatctacaacagcataggaaccatcaaccagcaggccatggaccagctgcactatgtgacggagctaactgatcttatcaagtcaaagtcatcacctgaccagagtggggtagacgattccgctaactttgtgggcttctttccaacctttgtgtggactctgagagatttctccctcgagctggaggttaacggaaaacccgtcacttctgatgagtacctggaacattccctgaccctgaaaaaaggagctgataagaaaactaaaagctttaatgagccgcgactgtgcatcaggaaattctttccaaagaggaagtgcttcatctttgacaggcctgctcagaggaagcaacttagcaaactggagactctgcgggaggaggagctgtgtggtgaatttgtagaacaagttgcagaattcacctcatacatcttgagctactcttctgtcaagactctgtgtggtggcatcatagtcaatgggccacgtctaaagagcctggtgcagacctatgttggtgccatcagcaatgggtctctcccctgcatggagagtgctgtgctgactttggcccagatagagaactcagcagcagtgcaaaaggccatcacccactatgaagaacagatgaatcagaagattcagatgcccacagaaaccctccaggagctcctggatctgcacaggccaattgagagtgaggccattgaggtcttcctgaagaattctttcaaggatgtagaccaaaagttccagacagaattagggaacctgctggtagccaagcgagatgcctttatcaagaagaacatggatgtctcatcagctcgttgctcagacttgctggaggatatttttggacccctggaagaagaagtaaaattagggacattttctaaaccaggaggttactacctcttccttcaaatgagacaagagctagagaaaaagtataaccaggctcctgggaaggggctccaggcagaagcgatgctgaaaaactactttgattccaaggcagatgttgttgaaacacttctacagacggatcagtcactcacagaggcagcaaaggaggtagaagaggaacgtacgaaggctgaagctgctgaagctgcaaacagagagttagaaaagaagcagaaggagttcgagctgatgatgcagcagaaggaaaagagttaccaggagcatgtgaagaagctgactgagaagatgaaagacgaacagaaacagttattagcagaacaggaaaacatcatagctgctaaacttcgggaacaggaaaaatttcttaaggaaggattcgagaatgagagcaaaaaacttattcgagagattgataccctgaagcaaaacaaatcgtctgggaagtgcactatactctgaaggcccaaggcccaaacctctctgccaagctctctccatcacacactatgttgactgagcatcttcaggctttgaaacaactgctatgaaactcaattcacctcagctcaaaatcaatcatatgcgactccattttggggtcactgtctgaccactgggcactgtcagaggaagtccctctgtgtgcagaatgcatgtatgagcagaggttcagtcacctgtgttataggtactctcggccttcatcatgcccagccatacgtttctcctgtataatcttaagtgttcctctttcctacagatagcttctgtaatcacagaacaggcaacttttaactaacttgcaaaatgaattccctttcatttctctgaggactttttctactgttattccaaacctaaatctcatcccaggtttcccttttatctccccactgtgacaacatgtcttgaaattactcaagacaaatgtcttgcaagagcacaagttaataaaaatgattagcccactgtaaaaaaaaaaaaaaaaaa

SEQ ID NO: 127 - DNA, 4084 bp, Mus Mus
ggagcaggatgaggcaaacagaggaaaagtttctcttcattttctacaggcttggtcactgagacagaagctgccctcctcggtgccagcctcggtacagactcttcacacagacttccgtgtttaaagaggactgtgctctttaagagggcttttccactagactgaagtatggccatgagaactcgtttgacatggcagcaagaaaagtgcctgcagaattattttggaggaaaacgtttttgtcttctttacaaggcgagtgtgcagaagttttctcatcagaatttgctctgcacatgtgagaatcaaggtcctaccatgatagtggtttacagtgaaaagtgtgttattggcatgtacctgaaagagggcttccagggaaaagatgtttctatcaccatttttgcactccaagagactggattttcactgtgtgcaaaaggaccagattcaccatatttattgttccataaaagaaaaactaatgatttctctatactattagatgagaaagctgtgattgtaagttcagcaatctgtaaaatgctccaactgactgctccccataatgtcatacctattcaggagtgtgaagcttttcgatgtgaaggtaagtttgctcagataaacctactgaaggctctcccctacctgcttggtgacatatgaccatgttagatgacatattcctgagggaaggacatgcttaaactcaggctctcaagtctggagagatgacccacagaagctgacctggcagaaattactaaaattctatcatgaaatgggactacttacctatgtataaactccctaggatgtcgtccttttgggtcatgacatgtgcagcctttactatgacccctccccctttgcctgtggtcattagttgttttttgtgagtttgactgtgttagattcctcacacttctgtgatcacatagagtagttggctttccttagttagcccaggccagttattagttcatttcagcttaagagtcaactcatcactaattggtccctgtctaaggttttacaatttatattcttggtttgactaatcactcctgtttgggttattgttgctttcagtttctttggagacccagttcctctgtgtagctctggctgcctgaaacttgctctgtagaccaggctatcctcaaattcacagagatcctcttgcctttgtctccgaagtacgggctttaaagctgtggtccaagactgcctgactcttttatgttcttaagagatcctaccggttttttgtttccattttcaaacattccttatttcctacccatgataaagcccccattatccacaaagtggcggtaaggtttttacacacttgatttaacataactatagttttatctttccctctccagacacaggtgctatttcagagagtgctttggtataaactcagaagtttgcttttattttggtatgtggtatttatttcaagtttaattatgtcttggtcattgaatgaaatctttataatgtatggttttggtaatttaatgatatttgcttggttgttctacatgtggccccatagtgagaattatttagagatttgatagcattgctaaactaatagtttcttggagtgactaggcattattatttttttaatctacttttgacttctcttttgagccaggaatgcatccattgaatagaagttcctattgacagctggcttgggaccaaaatttatgcatattttaaaaattatttttatgcatctctgcatactgcatctttctgacctaatactacatttggggggaaatatcagttgatgttagtcttaccttggtttgtgtatacttccatgttctgcctttctgattcagaagacacaccccgtccccatcccaattcctgttagagtgaagctgaaagaccagggagcagctaggagaactcatctgcaggctcctcctgaacgctgctgtctccaagtgagacaacgtggatgaggcacatttgtgaatgattactaatagctctgtccctagtgagtttgctcacattcatttgacctgccaatttaagaatttataatctatattatctgttattttctttagagttgttggatgaaagaaagacaagaggcattgctgtgtaagtcaatgttttttttaaattattattaattattcacttgacatcccttctcctctgagagggtggaggcccctcttggtatccctccaccctagcacatcaagtctttgtaaagctaggagcatcctctcccacttaggccagactggcagcccagctagaagaaagtgttctatagataagcaatagccttaggtatagccccttctccagttgcttggtacccacatgataacagagttgcacatctgctacgtataagtggggaggcctgggtccagcccatgcatgcttcctggttggtggttcagtctctgagaacctaaaaggtccagatttgttgactctgttgtcttcctgtggagttcccatcctctctggagtcctcaattcttgccccaactcttccataagagtccataagctccatccactatttggctgtggggactctaagtctgcttcagttagctgggggattaagtctctcagaggacaaccataacaagcataacagagtatcattaatggtgtcagggactggtgcttgccccattggatgggtctctggggttgggcccattattgcttggtcattccctcagtctctgctccaccccccgttcctgcatttctaatagataggataaattttgggttgaaggttttgtgggtgggttggtgcccctttcagtttttaaaattttattgctctattaccttttattatgaccatgtatgtcacccaacttttgggcaccaaattatcacaattaatatatatgaatatcaatgaatagccaaaacccatgtccataatggctaaacatatggatcctggcaatggtaatagagcagtcagtgggaggggactatttttaatatgttttacttgaggaaaaataatgttgtctatgtgttggtgtcttttagaattcttatagtagggttttactttaggatgtgctgagaattattaccaggctgaaaacatctattaatgagaacatgttagaaatgtcctaagtctataaacttcaaatatatgttatataatgacttttaaggtttaccattattaatcttcacctttggcatgactaatatctattactgaattaacaagatgtaataatatcagtgaacagttttaggactgatcagcactgttatgtttcagttattataacaaaataccacaacccaaaagcaacttaaggaagagagggactatttgggcctagggagagagactatcacggtagggaaggtatggctaccatcatggaaagcatggcagcaggccccaggaaaacggttacagagcgaaaagacaggaagtgaccgaggttacaagccacgcaagggggggccttcactgatgttctcttctggcaaggttttcacttcctaaaggctctgaaaatctttcccaacaccaatgtccagttccctaagcctatgagggacactctcattcaaaccaccatattcaatgggcttgtgtgcacgtggaagaaggcaagctgctaattagaaacgctatagggtagagaagtgacttattagaagatgcatggtgaggtcctctgagccgaccagtcagttcttaatgtttgctacgtcttaacaggttacatagtaatttactgcaggccctgagagactacaagccctatggagacctggttcagcaaacacgagttctgctgctgggtcctattggagctgggaagtctagctttgtgaactcagtcaagtctgtgttcaagggcagcatcacacaccagatcttggtgggctgtgatgaagatggaatctctgacaaggtacttgtattttagcctacccaggcttctcggttcaacttaactgtattgggaactatttggccagtcaatcttatgtagactttatttaaatttatagt

SEQ ID NO: 128 - DNA, 2942 bp, Mus Mus
agtgactcggcgaccctcagcacgctcgcttcgggactccgctgtctccgtggccgtgggctctctttccaccaccgcctcggcttttttttgcccgttggccggctaggcagccacctcacgtagctgccccgtcgcgtggcttctgctccaccttcgaggttttaccacccgaactctggccgccatcatgtctgccacaacttctgaggctccaaattcagctgtctccagggaggccagcactcagtcttcatcagcaaccacaagtcaaggatatgttttgccagaaggcaaaatcatgccaaacaccgtttttgttggaggaattgatgttaggatggatgaaaccgaaatcaggagtttctttgccagatatggctcagtaaaagaagtgaagataatcactgatcgaactggtgtgtcgaagggctatggatttgtctcattttataatgacgtggatgtgcagaagatagtagaatcacagataaatttccatggtaaaaagctgaaactgggccctgcaatcaggaaacaaaatttatgtacttatcatgtgcagccacgtcctttgatttttaatcctcctcctccaccacagttccagagtgtttggagtagtccaaatgctgagacttacatgcagcctccaaccatgatgaatcctatcactcagtatgttcaggcatatcctccttatccaagttcaccagttcaggtcatcactggatatcagctgcctgtttataactaccagatgccaccgcagtggcctgctggagagcagaggagttatgttatacctccggcttatacaactgttaactaccactgcagtgaagttgatccaggagctgatattttgcccaatgaatgttcagttcatgatgctgctccagcttctggaaatggcccgcaaaagaagtctgtggaccgaagcatacagacagtggtctcttgtctgtttaaccctgagaacagactgagaaactctcttgttactcaagatgactacttcaaggataaaagagtacatcacttcagaagaagtcgggcagtgcttaaatctgatcatctctgctaactcatctcagggggttgttggttttgaatattaaaagaaactgaaaagttttcaatactatagaaaatttgacaaatcactcagactttctataaaagttatattagattgcatagttttatgttaaacttgttagatgtttatatagaaactggttttgtgttcatcatatagttgaaagaaaagataattgcaagtaaaaaaaaaagataaaaaataattttcaaataattgaaaaatagttgaaaggaataacttttaagatttaccgtaaggacttttagttgaaattggcattttaagagttcaaaaacaagtactaattttcaagaaaagaattttataaacctattttgaaaggtcaggattttgatagtttgactataagaatttcacttctcaacaggtacctgaacagtacaatattaacgatattgtactttatatttattatttgtctaaacatttgccacaaaagcagaatttttagaactgcatttttaatcaatggaactcaatatatagttagctttattgaagtcttccttatctaaacccaggaaaacagattctcaacagtccaatcagtgggtcttaacatttatacaaaatattttaccctttatctagaatccacacatatacatatatcctatttatttggttgggatggtaattaggatatctaaaattctaggtataattttgtttaaagaatccaagacaaactaaatttcactaggtgtataagctattcttagtgagttaatactctttttttttttttcttaaaatgctaaactcaatggctgtcttaaaattgtgcaaaatactggtattaaagagtgctgaaaattttttatgtcacttaaaagttaatcagagtatctgaaaaattgtttttataaaaacattcaaaatattagttgttacagagtaaatacatttttagttttgttagtctattgtatttccctttgtaaagtaaaatatgtccaaaacagtcaaagtaggcaatttgacatttctaaaccacaaaatgtgtttcataaatgtatcccaagaatgtgctaaagtgaatctgtttttagactagatggacatgagatcattggacattatgcattgtgacagcagagaacctttgtacccacagtcttttgcagtcttaatcctattctgtcaggattgctccctggtataaagtagacaagtaacagttaacaagcagctcaggggctaagccttaggaatatagcactggaacagcaccttgctacctaaaacaattggctgaacatcaatctgacctgccagggacatgagttttaaaatgccttgttgatctatcttgtattagtcctttccttcaaacatggattccacttactcttacttagtggaactaatgggtcatatcacaactgtccctaatgatctttaactcttaatcttattctgcatctaaagtcaaaattcttttatgtcaccaagtcagtatataccagaaaactaagaagtgtcctgaaatttaattctttttagattttgtccccttacttcagtgtatttgtagtgtatgtccttacatgtaccattctgtgactaaatatccaacttactatgaatgataacctaaattctgaggcacaaatgtaattgttgctgtatgactttaaagaaaagtaagggaataaacttttgtctgctgttttgttggagtcaagtatttaagagaagggagaaagagacaagtactgagcctttcaaaatggaagattaattttaaacttaaaagtatgttcctattacctatttccttgtatacacgaataaaacctttttttcaaaagca

SEQ ID NO: 129 - DNA, 2047 bp, Mus Mus
atctcattgtttcttcctcagggagcagctgtgaaggaaactaagtgaggggacagacacagcatcccatctttgtgccccacacagagctcagctttgaggccagtttcccccaagctgtggtgggtgtggcatgcctgactatcaaagggcaagggcctgatgggagcctataaagtgacttgggagaagccacacacctcacttggaggattctgggtggaaacttcagtcatctgatctgagagttagaaactgacagtgagcaccaactgaaggcttttacaggctccatctcattttcctcagacttctaaggcctctcctgcagccaccccaccccaagatggtgaccatgctgatgttcctggccacgctggcgggtctcttcaccacagccaaaggacaaaatttccatcttgggaaatgcccgtctcctcctgtgcaagagaattttgacgtgaaaaagtatcttggaagatggtacgaaattgagaagatcccagcgagctttgagaaaggaaactgcattcaagccaactactcgctgatggagaacggaaacatcgaagtgctaaacaaggagctgagtccagtgatggaaataagacagagcaacatagagggcatcacgggaaatcagagaccatcccaccctcttcaagttatacagtatacagtcttgatgccaccggcaccctactggatcctggccaccgattatgaaaactatgccctcgtgtactcctgcaccaccttcttctggctcttccatgtggattttgtttggattcttggaagaaatccttatctccctccagaaacaataacctacctaaaagatatccttacttctaatggcatcgacatcgaaaaaatgacaacaacagatcaagcgaactgcccggacttcctgtaaagggggcggggggggaaaaccacaccaggttatttctttgctttgcgttccctggctccaccccccacgcctcttaagtaccaagcaaccatggcaggcactagagggagagtaaggctatagaagccaatggagggaggggactcatggaaagttggcccaaacccaacctgaccccacactgtcaccttgctagcccaataataaacattttgctgatcagctgtgtttcctgtggattctgagctaggtttatagtgcaagagtcatggtcggcagatggttggaaaccctttggctgtagtttaaaggtagagaaagctgatggccaagttagatcctggtgactcggatccagggtccctctccacggcagatgctctggagggaattctgggacgtttttcacttctgtctggaggcttccttgaagcttttactttctcatcgggaagtcttcggaacagggccgaagcatgagcatcctgaaaatatctgggaaaagcagacagcctgtgaggaaaagacaaaggttgtttgtttggttggtttgttttgttttttcgacatagggtttctctgtatagccctggctgtcaggggactcactttgtagaccatgctggcctcgaactcagaaacccgtctgcctctgcctcccgagtgctgggattaaaggcgtgcgccaccatgcctggcttcaacggtgtttgtttgtttgtttgtttgtttgtttaatgatgcaaattttctctttcactcagaatttactgaggtccaattgcattccagtcagtgaaaaaaaaaatttagaatccctgaccaccgctctccttgcccccaagcgtcaactcagtccagtgatagaaataagacagagcaacatagagggcatcacgggaaatcagagaacatcccaccctcttcaagacacaggctcaagttatccagtatccagtctgtcttcaagccttggcactcccatgcctctgctccagtagcaagccagaaaccacctggtgttgttcttttctgatcttgtgacttttaaaaccaaaaacccagatttatcaccccacaagttcacttagttcctgttgtatagtctgttgtatgcttttcatttaa

SEQ ID NO: 130 - DNA, 789 bp, Mus Mus
atgactacttctccagtagaagtttgtgtcaatcctccatttttctttatattggctgaatttcaaaataatacagaatggttagattgtacaaatgtcacttgttttttgacgcaatgctggaatggaaccaaattcttagccttagtggttcatctaccaatctttgtccctgtgcctgttgaggcagatccagagaagttcccaataacgagtcttattcggcaaaagagaggttttggaatcacagctgccattgttacagccattgtggtgtccgcggcatcagcagttaccgcaggaactgctatggcccatcaaattaatactgctgacaccataagtcagatagcagaaaaatcctctgaagcattgcttaccctgcaaaaggtggattctcatatcgcctcagggttaatgtatattaataattcttttattaaaagtacagacctatctaattacctgaaggggaactggtcgcaggagctggagaggttgcagacgaggctgcagatgcagatcctgaaccttaatggaaccagagtggaaccagtgaccctcggagactttacctcttggcttacctctgctttttcttactttaaggaatgggtgggagtgattttgtttggtgctgccatatgctgtggactggtgttcatgctctggttggtatgcaaattcagaacccaacaaaaacgtgacaaggtgattataactcaggcacttttagctattgaaaatggctcctcccctgaaattttgttatccatgctcaagaattag

SEQ ID NO: 131 - DNA, 1197 bp, Mus Mus
atgaaccccaagatgattctcctgctcctgatgattgagaccgggataagtatacctttgtgggccatagtaagatcatggccagtacctttaccagtacattccaattcttctaccttgcctttattttttgcaacggaatgttatttggatgcgccttgggcgagacaaactcctcaagagccacgggtgtataatagtactagttttcatttgaattatacactatgctttgtgcataatgtggataaaccttttacaccctgtatatttttaaagaaaaagattatctctaattgggcagatcccattagccaaaataaggtgagttctggagtgttgtttaatgctttaacgcaagttgctcaaggagcgcaatcaggctcaggtgatgttgaaaataatataacttcacctataaacatcaccactattatgataaagggaaaggtgaccattcccaaaagatcacgatggcctgttggcaatgctactgctatacgcagcatgccttggtgtcatccggacctcgcatttcctatagttttttcaccttgtcaatcaaaaatttttcctcggaaagaaatagcaaagggttttgttttgtcacccccactagattttgctataatgaacgataaagaagatactacagggaaagaaaatatttggccatattaccaatggattttaagtaatgaggcaggtgctagtaccagtttgtcagcatttgcattgctgactggaacctttcatgagatattgaatgtttcttccacactttccaatacctctgcttatttagataatgtgacaactaatagagttatcagaaatatgactacttctccagtagaagtttgtgtcaatcctccatttttctttatattggctgaatttcaaaataatacagaatggttagattgtacaaatcctagagaagaatcttctgtgaacatggagggccgttcagatccccatgtaaattttaaagtctcatgtagaacataccagctccctctatccttggtcctcaccatccgtgctatttcttcatataaagcagtttccagaacttcccacaacactcgacagtcatttatctcaattaagctgggcacctgcatcttcgggagcatgctgcagcatgcttccagcagcatggtggatgattcacaggttgtgcggcatgtctag

SEQ ID NO: 132 - DNA, 900 bp, Mus Mus
atgactacttctccagtagaagtttgtgtcaatcctccatttttctttatattggctgaatttcaaaataatacagaatggttagattgtacaaatgttacttgttttttgacgcaatgctggaatggaaccaaattcttagccttagtggttcatctaccaatctttgtccctgtgcctgttgaggcagatccagagaagttcccaataacgagtcttattcggcaaaagagaggttttggaatcacagctgccattgttacagccattgtggtgtccgcggcatcagcagttactgcaggaactgctatggcccatcaagttaatactgctgacaccataagtcagatagcagaaaaatcctctgaagcattgcttaccctgcaaaaggtggattctcatatcgcctcagggttaatgttagtgaatcagagagtggatattttacaacataatatggaacggatgatggatgtcatacaaatgagttgtgtggcatccacatcgcatgtgtgcattactcccaataagtatattaataattcttttattaaaagtacagacctatcgaattacctgaaggggaactggtcgcaggagctggagaggttgcaggcgagattgcagatgcagatcctgaaccttaatgggaccagagtggaaccagtgaccctcggagactttacctcttggtttacttctgctttttcttactttaaggaatgggtgggagtgattttgtttggtgctgccatatgctgtggactggcgttcatgctctggttggtatgcaaattcagaacccaacaaaaacgtgacaaggtgattataactcaggcacttttagctattgaaaacggctcctcccctgaaatttggttatccatgctcaagaattag

SEQ ID NO: 133 - DNA, 1119 bp, Mus Mus
atgtctaaggatggagcagggaagaggaaggagagactgtgtcagaagatacaagaaaggagagactatgtcaaaagatacaagaacaaaggggaagataacaatgagccagctgcttcagtgacatggaatcaaactgaaaagtggccccaagagtatgagttaagacaaaagatggtgcttactcttagggtgtcagacatctcccttaacttcacagagctccagaatatggaggatggtggacagcaatcagtaaaagaaagctatggtcctcttgggtgcaaagggacagacggcagtccagatatctcagcacttcttcctaggtcagctgcaagtggagccagacctgctaagcaagagactctgcattttgactctgctgaggacatccattcacagtttcaaagcctgactgctgaagtgagcaagcgtggagcatctcacactctgaaacttgctaacagactgtatggagagaaaacctacaacttccttcctgagtacttggcttcaatccagaaaacgtacagtgctgacttggcccttgtggattttcagcatgcttctgaggatgcaaggaaggagataaaccagtgggtcaaaggtcaaacagaagacctgaagtgcaaggtgctggagatgccttaccagggtggagaacttagcatggtcattctgctgcctgaagacattgaggacgagaccacaggtcttgaggagattgagaaacaattaactttggaaaaactgcaagaatgtgagaacttacaaaacattgatgtctgtgtcaaattgcccaaattcaagatggaagagagctacatcctcaactctaacctgggccaactgggagtgcaggatctctttagcagcagcaaagctgatctctctggcatgtcgggatccagagatcttttcatatcaaaaattgttcacaagtcctatgtggaagtgaatgaggagggaacagagacagatgctgccatgccaggcactgttgttggatgctgcctgatgcccatggaattcacggtggaccatccattccttttcttcattcggcacaatcccacggctcatgtgctcttccttggcagggtttgttccccatag

SEQ ID NO: 134 - DNA, 981 bp, Mus Mus
atggctctaacaacgctgctcttgctggtggcggccgccctgaccctgatcgagacccgcgcgggcccacactcgctgcggtatttccacactgctgtgtcctggcccggcctcgtggagccccggttcattatcgtcggctacgtggacaacaagcagttcgtgcgcttcgacagcgacgcggaaaatccgaggatggagccgcgggcgcggtggatggagcaggaggggccggagtattgggagcgggagacacagaaagccaagggccatgaggagagtttccgagtgagcctgaggaccgcacagagatactacaaccagagcaagggcggctctcacacactccagtggatgtatggctgtgacgtggggtccgacgagcgcctcctccgcgggtacctgcagttcgcctatgaaggccgcgattacatcgccctgaacgaagacctgaaaacctggacggcggcggacatggctgcacagatcaccctacacaagtgggagcaggctggtattgcagagagagaccgggcctacctggagggcgcttgcgtgcagtcgctccgcagatacctgcagctccggaaggagacgctgctgtgcacagatcccccaaaggcacatgtgacccatcaccccaggtcttatggtgctgtcaccctgaggtgctgggccctgggcttctaccctgctgacatcaccctgacttggcagttgaatggggaggagctgacccaggacatggagcttgtggagaccaggcctgcaggggatggaaccttccagaagtgggcatctgtggtggtgcctcttgggaaggagcagaattacacatgccatgtgaaccatgaggggctgcctgagcctctcaccctgagatgggagcctcctccatccactgtctccaacatggcgaacgtagctattctggttgtccttgtagcttggccatcattggagctgtggtggattttgtga

SEQ ID NO: 135 - DNA, 2775 bp, Mus Mus
gaaactgaaagtgaaatttggactgcaggcttgcaaaagcgaagctgggagcacataactaaagctgaggaccctggttagaaactcggtttccccttctgcctggcttgctcagtgggtgaggccggaggagaggctcctgtcattcagattccacggcagatatcaccctctacaacctcaaaaatgtctctggaaaagatgtgggaggaggtcacctgttctatctgcctggatcccatggtggagcctatgagtatcgaatgtggccattgcttttgcaaggaatgcatttttgaagttgggaagaatgggggcagttcatgtcccgagtgccggcaacagtttctgctccgaaacctcaggcccaatagacatatagccaacatggtggaaaaccttaaacagatagcccagaataccaagaagagtacccaggaaacgcactgcatgaagcatggagagaagcttcacctattctgtgaggaagatgggcaggccctttgctgggtgtgtgcccagtctgggaaacaccgggaccacaccagggtccctattgaagaggctgctaaggtataccaggagaagatccacgtggctttagaaaaactgagaaaggggaaagagttggccgagaagatggaaatggatctcacgatgcaaagaacagactggaagaggaacattgacacccagaagtcgaggattcacgcagagttcgcacttcagaatagcttgctggctcaggaggagcagaggcagctgcagaggctggagaaggatcaaagggagtacctgagactcctggggaagaaggaggctgagctggctgagaagaaccaggccctgcaggagctgatctcagagctggagaggaggattcgtggttcagagctggagctactgcaggaggtgaggatcatcctggaaaggagtggatcctggaacctggacacgttagatattgacgccccagacctaacaagcacatgccctgtgccagggcggaagaagatgctgaggacatgttgggttcatattactctggatcgcaacaccgccaactcatggctcatcatctcaaaggatcggagacaagtgaggatgggagacacccatcagaacgtgtctgacaatgaggagaggtttagtaattaccccatggtgctaggtgcccagagattctcctctgggaagatgtactgggaggtagatgtgactcaaaaggaggcctgggatctgggggtttgcagagattctgttcagaggaaagggcagttttcactcagtcccgagaatggcttctggaccatttggttatggcaagacagctatgaggctggtaccagtcctcagaccaccctccacattcaagtacctccatgccaaattgggatctttgtggactatgaggctggcgttgtctccttctacaacataactgaccatggctccctcatttacaccttctcggagtgtgtttttgctggacctctgcgacctttcttcaatgttggtttcaattatagtgggggaaatgcagcgcctctaaagctctgtccactaaagatgtgatggtcaggagccagtgcctactgacggtacttcccggacacttacctcctccctgtcctgatcaagatccagtgactcctggggaccatttctggatactgctgctcacttcctgttggtgttcttcagccatgcacttggtcattttgacccatctagttggaactaccctaaaccctcatctctttaaaggagtcagggtcccaggatgaaggtatcagctggacataactgaaagtcaatgtcaaatgaccttcaccatcaatatacctgacatagattccgcaatgattcctcaatgaaacagactcctcacattggacccaaactcatctaaaagacaaacaaacatttctgcctttatgtgacttcctttgttttctctgtccttggttgttacctttggctagatacctgtctactcctatatcttttgtggcttgcagaaggacttcctagaaattgtgcttgaactatcctgttcagttattattggtaaaatatatatatatatatatatatatatatatatatatgcatacatatgtcttaacattatacatcttctggtttggtttgttgttttgttgttactgggggattttagggttttattgttcgttgtttgtttgttttccctccctggaatgctctatgcacttcttctgtaaacccaggtcaagaatatcttctatgggaacaaatgaaagccaggataaagtagtgaaagtggttcagacaagagctgaatgttacactgacagtatgctcagtatccccagtgatagccaaagtctgggtgctgtgctgggtctggtcagtgaacccctgctgttgactctcacaaggctacaacagctgtgctcagacactgcctgctgtcattttgtggatatgttggtttctgattccattgccttgaagaaagtgaaattagtagctgaactagtatacaaatattttgaaagcttcaaaaatactacctggagatttatgttacatagttaataaaccccttattctccactgaatggaattgggaggtttcatactatctcagctttcccccatagccaataacaaatggtctggatacaagtgtctttgttacataaaagttaccttgagaaagatctccaagtattggttccaattctgaataatatgtcttttaagatcaaataaagcctgttgattttc

SEQ ID NO: 136 - DNA, 780 bp, Mus Mus
cccccaccgagttcagaactttcagcagtcagtggttgccggcagggtaagttcacggtgagtgaaacttgcgaccccaggagtttgggaaggacctcggaaaaaatagaggtgagcataaagttgccaggaagtaggcacaaagtaaagttaaggttcctggttttgggacaagttaaggttcccggtttggggacaagttaaggaactatgataaactcagtgtagtgatcaatagatcctcgctgtgtagttatgcttttttctcccattgaccctttgtgggtaggtctgatagttttggtcttgcttgttctgatatatggactctgttactgtttgaaactgtgtgtagaggcagtcaagacaggtcagaaaatccttacggagcaacaagaaagtatgtcggaagaggagaagggcttaaaaagaaaaaagaaaaagaaaggagacacagtgttatcaggtggacagaaaggacgaaataaaagagccgaggcagaggaggaaggcaaattagcttctgcgcctcctccctatgcctcctcagcagccacctgtaggtggaccttcagtccggagatttggagaagatcgaccagatctggtgttgacgtgggcgagagggtctgtttgtgtgtttccacaggaccagacggaacctctttgggtgctggagagattggtgagacgctgcaagaatgaggctcctgatccagttgcccatgtggatgtggtggatgatcccacaagcacaaacgatggagccaagatgggaga

SEQ ID NO: 137 - DNA, 2361 bp, Mus Mus
gcacgaggagaggaagagccagaggggactaaggaaggaagagaagcagtcaagcaaaaaggagtgtgtagaggaggtggccgggccaggggagacattgaggcccaggtatcataagagaaggggacaattagaaaaggcagttaaccggggacactagaggaaaggggggccgggaggataaggtagtggagcaagcaggatgatggggtagggttggggggggggggggtagactaggccagagcagaggaaggaaaggagacgatttgatagaagcacaggggagatgaacaagaagaactgggaggggaaggagtgagtggagagttcaagtggagatagaaactaggtagcaaggagagggacctgagggaaaaagagagagagaacgacacggggtgagaaaagagggcgatcagggttaggggagaggaggggaggacagaggagagagtctgggtcacggagacaggaaggccaggatgtctgcccctcgcgcggaagagcaaccaagcaggtccggagagcgacaaccgctggtggcccgaggcccgcggggaccacgacggtggagacggacagctgctgctgcggtgctgctagtgcagatgctggaacgcgctgccttctttggtgtcacctccaacctcgtgctctacctcaacagcttgaacttcaattgggacggccaacaggcatcacgggccacactcctcttcctaggcgcctcctacctgctggctccagtggggggctggctggcagacgtgtacctgggacgcttcctcactatctcgctcagcctgctgctctatctggctgcctctggcttgttgctcaccaccatcaccaatgatggccgcagatccttctgtggagagatgcccgagttgccactggaacctgcctgcccatcctcaagctgccaaggctcctggtccagcccctactgcgcgaccaccctctacttggtgttgctgctcctggccctggctgccagctccgtcaggagcaccctcacctcgttcggggctgaccaggtgatggatctcgggcgcgatgccacccgccgcttcttcaactggttctattggagcatcaacctgggtgccatattgtccctgttggtggtggctttcatcgagcagaacatcagcttcctatggggctacagcatcatcgtgggcctcgtgggcctggcattcttcatttttctctttgccacaccagtcttcatcaccaagcccccaacaggcagccaagtgtcatctatgctgaagcttgcgttccaaaactgctgtccctgccggaagtcctcttccagggactctgaaagtgcccacctgttgcctgaccagaggtctaaccagcctggaccttctccacaagaagatatggccaacttccaggtgctggtgaagatcctgcctgtgatggtgacccttgtgccttattggatggtatatttccagatgcagtccacctatgtcctccaaggtctccacctccatatccccaacatcttcaggaccaaccctaacatctctttgttgctgagatcagatagcagtaactacaggatcccagaagcctggctcctactggccaatgttgcggtgatcctgattctgatccctgtcaaggatcacttgattgatcctctgctgctgcggtgcaagctgctgccctcatctctgcagaaaatggccctgggcatgttctttgggttcacctccatcattgtggcaggagtcctggagaaagaacgcttacagtacattgctgccaaccagacagtgcctcagctgattgggaaggacttatactatgcagcgccactgtctatctggtggcagatcccccagtacctgctcatcggggtcagtgagatctttgccagcatcccaggtctggagttcgcttactcagaagccccacgctccatgcagggtgcaattatgggcatcttcttctgcctttccggggtgggctcactgctaggctctggcttggtggccctactgtcttttcctgggggctggatgtactgccccaaggactttgggaacatcaacaactgtcagatggaccgttacttcttcctgctggccggcattgaggctgtcacagccgtcctgtttctctggattgctggtcgctatgagaggactcgccaggacccagcctcccagcgctcgtccagcagggtcagaggctaatggtctccacccaccctgacagagagtgtcacagcagtaccagctatgcccattcttttctcatttattctgtacccaacagtagaatgaagtggttcccataaataaggggcatgcgcaaaaaaaaaaaaaaaaaaaa

SEQ ID NO: 138 - DNA, 1490 bp, Mus Mus
agccgaaagaaggtctaaagagggaactgtaagactttggaaagagctatgcagtccaaacgggagtgcgagcaatggtgtgagagggtgaatccagagaacaaggcagccctggaggcgtgggtaagggagactggcatccgcctggtgcaggtcaacgggcaaaggaagtatggagggccacccccaggctgggtgggcagcccgccaccgtcagggtccgaggtgtatatcggacgacttccgcaggacgtgtacgagcaccagctaatcccactcttccagcgcgtggggcgcctctatgagttccgcctaatgatgaccttcagtggtttgaaccgcggctttgcctatgcgcgctacagctcgcggcgcggtgcccaggccgccattgctacgctgcacaaccaccagctgcggccttcttgccagctcctggtgtgccgaagcaccgagaagtgcgagctgacggtggacgggctgcctcttagcttaaaccgccgagcgttactgctcgccctgcaaccgttcggtccctgcctccaggagacactgctgctacccagccctgggtctgcgccctctcagattgcgctgctcaagttcagtacgcaccgagctgctgctatggccaaaaaggccctggtagaaggtcagtcacgcctctgtggagagcaggtggctgtggagtggctcaagccagacctaaagcagcacttccgccagcagcttgcaggtccctcactgcggttcctcaggccagatgtcagccaactaacccagaccagggagaagctggggtcccaaggggctcgggctgccctgcaactgctgtgtcaacggatgaagctaggcagcccagtgttcctgaccaagtgtttaggaacagggcctgctggctggcatcgcttttggtaccaggtggtgatccctgggcatccagtgcctttcagtggcctcatttgggttgtgttggcctctgattggcaggatgggcatgaggtggccaaggatgctgtgtccgcacagctgctggaggcactgagtgaacctaggaccagcttgtggtctcctggggctgaagcaggtactatggttaagcagtgaccccttctttttacaggtaccctaaatgggttaagcagagcctgtgccaaccccccagcccagcaggcctgggcagcccagggcctggtgacagctttccctgctgggacagggccctgttgcacctaagtgctactttagttgtgaggaaccttgccctcccccactgagcccagggtctgacctgctatccttagtcaattcccagcttggcaccagagcttactatgaatctttgtttttatttggagaactggctgaaccaaagagcccttcctcccaccacttgtccctggtttgggcttacatggtttttgtttttctatactggttttatttatattaaaaccccagttggtataaaaaaaaaaaaaaaaaaaaaa

SEQ ID NO: 139 - DNA, 609 bp, Mus Mus
atggcgaaaggtaaacgtaagaatcctactaacagaagccaggaccactcaccatcatcagaacccagaacgcccacttcgcccaatccaggacaccctaacacacctgaaaaggtagacctggatttaaaagcatatctcatgatgatggtagaggacataaagaaggaattcaataactcacttaaagaaatacaggagaacactgctaaagagttacaagtccttaaagaaaaacaggaaaacactgctaaagagttacaagtccttaaagaaaaacaggaaaacacaaccaaacaggtagaagtccttatagaaaaacaggaaaacacatccaaacaggtgatggaaatgaacaaaaccatactagacctaaaaagggaagtagacacaataaagaaaacccaaagtgaggcgacgctggagatagaaaccctaggaaagaaatctggaaccatagatgccagcatcagcaacagaatacaagagatggaagagagaatctcaggtcttggtagctcagcatggaatactcatgatacaactcacagacgacatgaaactcaagaggaaggaagaccaaagagtggatacttcagtcctacttag

SEQ ID NO: 140 - DNA, 1641 bp, Mus Mus
gatgagtcctgggtctcgggactcttggaggcggaagcgctcgctccagtcatgtttcttggcgctctctggttgctgctgctcctgccgctgcgccccccgggagcgcagggccaggaggccgacgagcccaccccttggccgagcgtcaaaggcctgaaggagcagctgaggacggccggtgccctctccaaacggtactgggagcttttcagctgcaccttgtggcccgatcactgtgaagaccaggagacccccgtgccgcctctgggctggagccttcctctgtggggccggcggtcgctggatgtgctcactgcatggctctgccactttcaggactgctgcagcggcggcggcgattgcaggatctccaacaacttgacaggttggagctacctctttcaggaagagttgcagaggcagatgcaggagacgcagtggcgctgccaccagagcacgttcgtctttgacgaagcggagaagctgcacccggggctgctggagctgcttgaaccctacctggaaccgaggagccctgaggcccgtggagttgaggcgccccgagccatcttcctttttctcagcaacctcggaggcagtgtcatcaatgaggtagtcctgagtttgcttaaggctggatggtccagggaggaaattacgacgcagcacttggaggtgccccttcaggctgagatcatggaggctgcagacagcagctttggctccagcggtctcctgaagaaacaccttattgaccactttatccccttcctgccactggagtaccgccatgtgaggctgtgcgtccgagatgccttcctgggccaggatctcccatacacagaagagaccctggatgaaatcgccaagatgatgacatatgtccctgaggaagagcggcttttctcctctcagggctgcaaatccatttcccagagaatcaacctcttcctgccttgaaagtgactcctgtgcaccctaaacaatcctcctccacaagagacagccatctgccaggtgccctggcgtccagcaatcactgctttcagctggtgtgcaagaggcagttcctaacagaggcagtttctaaaaaccacttggtgccttaaaaacctacattctagacaatctagactgagggtcaggaagccagtggaacggaaggtccaagtaccaaaggatcctcagaacactccctacagtctcctggcaccgtagctcttcctggaaggcagctggagttcatatgagcctgaggctctaggatctttgggctacagaacaaggaatatgtgtggactagaggcgtgtggtccaggtctgcaggtctggctggctttccttgctttccggcaacgtggggagaggggcagcttctgcatgtgagaccagcaaagggccttaggctaaaggacaaactgaagctttcaaaacaggatgggtgtggcctagcactgtagtaggctaatatgggagagagagctaaagaaacctgagctgcctcgtttgagcagcctgccaggcttgaccaaaacacaggtgtatggatagctaaggcatgttctgttgtgcagactgaaaactttttaaagaggcctcgtcatgtgcaattaaatcttgtatttttctaacatcctt

SEQ ID NO: 141 - DNA, 7005 bp, Mus Mus
gcattgcactttttttcctttcaggaacgtgttcgggcccgcggcagggggcggggtcgcgcctccgcctcggctctggttccagccgagcctcaccgacgccgagatggaaatcccgaggctgctcccggctcgcgggacaccgcagggcgccggtggcggcggctgcccggcgggtggcggcggggtgcaccgagccccggcctctctggcttgtcaggcccccacgcgccgcctcctactgctccggggggcccaagatggcgggccggggccgcggagcgcagaggcccagagggcctcccggggcctgggcccgagcctgaaccggttggcgccgaggcccgatcaccggagcagcggcggcggcagaggcggcggcgctggcggaggaggaggaggcagcggcggcggcggtggcggcggcggcggcggcggcggcggcggcggcggcggcggcagcagaggcggcagcgacgacttcttcctgttgctgcttgacccggtgggtggcgatgtagaaaccgtgggcacggagcaggccggagcgcccgtgcggagggaggaggccggggcaggcccgaggcccgagcggcgccagagcgccgggcccccagcgggccgtcccgagccgggtccccgctgtctgtctgcggtcccggccgcgtccccgcttcccgcggccggcccgggcccagcggcggcggcggcggcggcggcggcggcggccttcgcgggcaccatcaccatccacaaccaggacttgctgctgcgcttcgagaacggcgtcctcaccctgaccacgcccccgctgcccgcctgggagccgggggtcgcgccgttcccgcagcctcagccgccgccgcagccgggggcgctgatcgccccgcagccgccgccgccgggtttccgcccgccgctgccgccgccgccgccgccgccgccgccggggcgcagctgggcgactgccccgagctgccgccggacctcctgctggcggagccggcggaacccgcggcctgcccggcgcccccggaggaggaggccgaggccccggccgccgccgccgcgcagagcccccgcgggcccgcgggcccgggcccgggcccgggcgtggtgctgtacctgtgcccggaggcgcagtgcggccagaccttcgccaagaagcaccagctgaaggtgcacctgctgacgcacagcagcagccagggccagcggcccttcaagtgcccgctcagcggctgcggctggaccttcaccacctcctacaagctcaagcggcacctgcagtcgcacgacaagctgcggccattcggctgcccggtgcagggctgcggcaagagcttcaccaccgtctacaacctcaaggcgcacatgaaggggcacgagcaggagaactccttcaaatgcgaggtgtgcgaggagagcttccccacgcaggccaagctcagcacccaccagcgcagccacttcgagcccgagaggccctaccagtgcgcgttttcgggctgcaagaagaccttcatcacggtgagcgccctgttctcgcacaaccgcgcccatttcagggaacaggaactcttcgcctgctccttccctggctgcagcaagcagtacgacaaggcctgcaggctcaagatccacctgcgcagccacaccggggagagacccttcctgtgtgacttcgacggctgcggctggaacttcaccagcatgtccaagctcttaaggcacaagcggaagcacgaggacgaccgcaggttcacctgtcccgtcgagggctgcggcaagtccttcaccagggccgagcacctgaaaggccacagcataacccacctgggcaccaagcccttcgtgtgccccgtggagggctgctgtgcccgcttctcggctcgcagcagcctctacatccactccaagaagcacttgcaggacgtgggtgcgtggaagagccgctgcccggtccccacctgtaacaagctcttcacgtccaagcacagcatgaagacccacatgaccaaaaggcacaacctcagccaggacctcctggcccagctagaagctgccaactctctcacgcccagcagtgagctcaccagcccggggcagagcgatctcagtggggccgagctcgtgtctctgttctcggatgtgcctggccacggttccgccgcggtgctggacacggccttggtcaactctggcatcttgactattgatgtggcctctgtgaactcgagcctcgcgggaagtctccctgcggataataacagcaacaaccattccttggggcaagcggccgagcctcgggccttgaggggggcccccagtgacctcccccagagtctggatacctctctcttcttcggaacctcggtggctggctaccagcacagccccttggacatggacgatgtctccgccgggaacgtggggctctttggctccttggccctgaaaaactcaagcctggagccgcaggctttgacacccagcaataagttgactgtggacacggaagctctgaccccctccagcaccctctgtgaaaacagtgtctccgagctactgaccccagccaaagccgagtggaacgtgcaccccgaatctgacttctttggacacgaggaagaaacccagttcggattctcccacccaacaggaagccatgggtctcagaaagacacagatcttatcacggtgactggcaccccgtttttggtatgaaccgactctgcctgttccctgcctgccctgtggctcactttgttgttgttgttgatgttgttgtttttatcacactcaaatgtgagaatgttctggaaggagcgcttgcttgcctgcagttgtttcttgctgccttgcaaaggaacgcatctgtggattaccaatttagggatttcagttctcatcttgagtctgggactgataagttctctgactgtgagcaagtctcttaaccgagctgagccttaattcattatttataaaagtagtcttttttttgtctagcttatttctctttccttttcaactgcatttcaatttttttgtacacctttggtgtaattttttagagtatttcatagtggttacatatgagtctcatgtaatgaacaggaatgtgatccctttgaacattaaatgatcagagatagaggaactcgtgttttaacttttaccatttatcttaccttctttcacagtatccattgtatcagtagagtgcaaaaatgttgtattttatgtggttgtttgatgttttctcagtcttcttatgttgtctttctgtagaagggttttttttaaaagaaaaatatcagggatttgatatattacaagcatattctaaaatattgcctcgttaccattgaacaagtggccttatactagtcatttagtcttgccaagccttactccgctagctttacagtgctgatagaaatgcacattattctcatgcatattgtatctattgatgcttgagattgttactgaagggaaaatatatgcttgggcttttctgaatcttctttagttgtttctttctttctttatttctttctttttttctttctttctttctttctttctttctttctttctttctttcttctctgcctccttttttcccctcttcaaatcctagagtacacaagataggaaacacatgtatcatagttttcagccaataatataagtattatgcatagatgggaatttattccttccacaatttcttgaggaatttttctttacagagttctcatttaacactgttcactgttttattcgtccacttaactggtgtctgctctggatcaaagccagctcttggcctgactctactattctgatagaatttggaaatggaccagaaggtaatatttctttttcctggtgacctcatttgtagccctctctggaatgagaggtttgctatgtattttgaaatagaaatactgtcaatcttagcatgagtgtagcattttatggtttatatagaaaattcatatctaatatatttgatcatcataatcttgatgagaaattgtaaacttaaactgatactaaaactttcctgatgtaaattgatttcatttggtaaatattaattatttctatatgtgtagttcacatcaaagaggaaatatttctacctctcccattctgctcttctgaattccacaatcactttgttaatgagcaatccttttgttgtgcctatggatatccttgttcccttctgctttttctgctccccccccctattcctgtagttcctgatatatgcacaccagtgtgtgctatgcctctactttttttctctaatttttcacttctttttggtcactcttttctctcacatgatctatttttttagtcacaataattattacagtctgtatgcaccacgatggtattttctggattcagcttacaagtgtgtttacaggaggcagatgttaatggaaacactttatcctataagatctgatgacaagtacctctttcaatttgtttgccgtgttttctactagaaaagagttattttgaaatactcaaattcaatactgttttttgtgaggacacttgaagaaaacacttttttatagtactttggcaatatataatttgccactttgaaatacattatatactactacctttataatttttatattgtttgaacccatttagtaaaaaggtaataaaagtacacattaacttttaatttaaagaagtattcagaattttagtgtgtccaagcatcaagattattattgacttagcactttgaaaagattttaaagactatgttagaaatgcattttcatgagttaaacatttctcattttattcttcaaggaatgcaaagacctgaggtaaacacagactttataagcattattaagatatataaccgtaaaggtattttaaaccgtcactttgtttcttttaaatttcttccaactaaagactatactaaaatattcttatctatagactgtagaatttccaaaggataaaatttaatttcttgatgataaaaaatcatgttgttgtctttctgatttctctccataccattgccctagcatgaatgactgtaattacagtgactacacgtgacaacacatataatgatcatacttctggtaatataaatttgacatttttgaaatgatgtcttgatttcattttatctcctttgccttttgtgtttctgtagtctttcttgatctattaagattttctaattgtattaataacaaaatgcgttatatgaagattgttttcaaagggccttgtttagccttttgatcatgtaaaatatgttaagcttgctataacttgatatttcagttacttaatattgtactgttaaataactgaaagtcttgagtattataaataaaacttgatggattttcaggtcatctgtcaggaaattttccatcatggaaaagaaaaggattatagtgtaacaggatatttagaatattagctctctggagttattcataatccattagtattaaacctatttaataatgcaaaaaataacttatggaccttacccaaaatatgtcataattgaaatgtaagactggactacattgtatgtgtctattgcttttgaacactgcagcttcttttccttgacattttttaagggagaaagggtttatgtattctcacagttctgtagcactgtctataacactggagagattacagcagcagggacctcacggatgtgatcacattagatacgtagtcaagactagagagactaacaaatggatgtgtgctcatcttaagctttcgctctccaccccagccacaactaagatgggactcctacgacaattaacagcatcaaaataatcccctatggaccctagccatcgttctggtgatgttagattttgttcagttgagaatgaatactaatcattacagtatgcattctacaaagttcagggatgaaagatctcttataactgtgctgctttatgatgtacaaagttctcataaatagtttgtgttatcatcttcattttacatttgagaaatatgaaatgctaggaagtttatgtgattttcctaaaatcataattttacaagtggttgggtttggtgtagttgaaaaatccttccagaatcctgatgatactttaagcataatacactattataatgttatgagaggcagagacctagacatgtcagtctcaccaaatctgaatttgtgtactagaatagactatttccttgattattaatcacccctgaaattgttctagaaattcttgcaacaatggctataaatggtctataagaagagtatttcaaaaccttccagatctgttcagtggtccagaaagaggttttaagaatacatatcccccagtcgggtgtggtcgcgcacgcctttaatctcagcacttggggggcagaagcaggcagatttctgagtttgaggccagcctggtctacaaagtgagttccaggacagccagggatatacagagaaaccctgtctcgaaaaaccaaaaaaaaaaaaaaaaaaaaaaaaaaaagaaagaaagaaagaatacatatcccagccccaatgagcataaaatattcttatttatgttggaaactaaaaataagactgatatatttataccttcaattgctcctgaggtagttggaattatccactagaaatatcttctagagtaaacaaaaaggtaattatttttctcaagtcaccatcatttttcaatataaattttgtattatattaaatatataattttaaattgttattttttgagattataaatacattattttccccttccctttcattccttcaaaccctctcatttggccctccttgctctctttcaaactcatgacttcccttttcatgaattgttgttccatacatatatgtattagtaaatacttaaacacaatcggcccagtctatgtagtgttgcttgtata

SEQ ID NO: 142 - DNA, 1558 bp, Mus Mus
gaagccaaggccatctgggtcctgttaggtaagttgagcctcttcgctcctctgcctcctcatcctcacaatgttacctcgggaaagagagatagctgcctcattctagggatcaactcaagaaagagagcagacacaccatccagggagccactgggtatctcagaacatggcaagcagtggatacctgtatagcctggtggctgaagatggagcctggcaggcgtttgtatccaaggccaagttgtccagggagagagcagtggccctccacaaagctctgagggaactgacagcgctcttggccatagcagacagaggcagacttcaaaaaggtctgaaaggcagggagaagtttttgaaagtctttcctcgcttgaaagcagagctggtggagcatatcagtcagctccatgccctggctgaccacgctgagaaactacacaggggctgcaccatctccaacgtggtggctgactccttcagtgctgcctctgacatcctgagcctccttggtctctttctggcacctgtgacagcagagggaagtctggtgctctcagcaactggcttggggctgggggtagcagctactgtgactgatgttgctacctcaatcgtggaggaaacaagcagggttttggatgaagttgaagctgctctgactggcactcatgtgctgggggaggctggcacaagtgtagctaggattgtcaacaagatccctcaggctaccagagacatcaccagagacctggaagcccttgagcagcacatgaatgccctcaggctggttagagctaaccctcgtttagaagaagatgccaggatcctggccaccacaggaagcatctctgcccaacgggctatgcaggtgcgggccaggctggaaggaacccctctggcaatgagcaatgaagcccggatccaacgtgccgccaccgcaggtgccgccctctggagtgacgtggacagccttgtcaaagagtcaaagcatctgtacgaagggtctgcgtcagagtcggctgaagcactgaggaagctggctcgagagctggaggagaagctagaggggctcatggaattctacaagacgatctgatcaggccccagtcagtcaccccatccccaagacaggcagaggtcaggggggaggacctggacagaggagagcaagactgcagtcaggtccgagagacccagtgtgtaggcctgctgctgaacacagcacaatcaggtgagaccccctggtgcctgagacgagagaccaaaggatgtgctgctgtgagagggactggaaagattgaactctggactaaacacggaagaagccagttaagagaaggactagaaagccctccccagctgagctactgcaaacaagaccccacaaaaggcaaaccagagagaaaggtgtgtgctctttaaacacatcatgagccccatccctgtgctttagagcctgtgcttctccccagctccccagccgacacccatcctcaggcatgtcatggtcccctaaataaaccgtttctgttgttcctcaaaaaaaaaaaaa

SEQ ID NO: 143 - DNA, 2304 bp, Mus Mus
atgtcctcctgcaccttcacagccctgctctgtcttggactgactctgagcctctggatcccagtgctgacagggtccctccctaagcctatcctcagagtagagccagactctgtggtctccagaaggactaaggtgaccttcttgtgtgaggagacaattggagccaatgagtaccgcctctataaagatggaaagctatataaaaccgtaacaaagaacaaacagaagccagaaaacaaggctgaattctcactttcaaatgtagacctgagtaatgcaggtcaatatcgatgttcctacagcacccaggatgaatcatcaggctacagtgacctcctggagctggtggtgacagaagactactggacacccagcctttcagcccaggccagcccagtggtaacttcaggagggtatgtcaccctccagtgtgagtcctcgcagagctatcacaggttcattttgactgtagaaggaccacagaatctcatatggagacaagactcacagtataactactctacaaggaagtaccacgccctgttctctgtgggccctgtgacccccaaccagagatggatatgcagatgctacagttatgacaggaatagaccatatgtgttctcagctccaagtgaatccgtggagttcctggtctcaggtaatctccaaaaaccaaccatcaaggctgaaccaggatctgtgatcacctccaaaagagcaatgactatctggtgtcaggggaacctggatacagaagtatattttctgcataatgagggaagccaaaaaacagaaagcacacagaccctacaggagcctgggaacaagggcaagttcttcatcccttctgtgacacaacaacaagcagggcaatatcgctgttattgttacagctcagctggttggtcacagcccagtgacaccctggagctcctggtgacaggaatctatgaacactatgaacccaggctgtcggcactgaccagccgtgtggtgacagcaggagtgaatataaccctccactgtgcctcacacagtcactatgataaattcattctcacgaaggaagataagaagtttaccagctcacaggacacagagcatatatcttctagtagacagtaccaagccctgtttatgataggacccacaaccccatcccacacagggacattcaaatgttatggttactacaagaatgccccacacctgtggacagtacctagtgatctccaacaaatactcatctcagggctgtccaagaagccctctctgctgactcaccaaggccatatcctggaccctggaatgaccctcaccttgcagtgtttctctgacatcaactatgacagatttgctctgcacaaggtggggggagctgacatcatgcagcactctagccagcagactgacactggcttctatgtggccaacttcacacttggctatgtgagtagctccactggaggccaatacagatgctatggtgcacacaacctctcctctgagtggtcagcctccagtgaccccctggacattctgatcacaggacagctccctatcactccttccctctcagtgaagcctaactacacagtgcactcaggagagaccgtgagcctgctgtgttggtcaatggactctgtggatactttcattctgtccaaggagggatcggcccagcaacccctgcgattaaaatcaaagtcccatgatcagcagtcccaggcagaattctccatgagtgctgtgacctcccatctctcaggcatctacaggtgctgtggtgctcaagattaatctttctacctcttgtcatctgccagtgcccctgtggagctcacagtctcagaaaccactgaatcctccacctggtctcccaaaaggcccaacccaccaattcccacagagaaccaggatcacacaacggagaatctcatcaggatggggatggcagtcgtggtcctcatcgtcctttcgattctagccactgaggcttggcgaagccatagacagacccaccatgcagctgggaactactctgaggagagaagaatgcatcttcaatgttctacactctgggaaataaagatgatgacccaaagttgtcaaaaaaaacgaaaaaaagaaaaaaacactgttgtggtattgaggaactgctgtgatagaatgtctggggagcaaaagtttggggttcatagggaagtggaatttgataatgaggtgcttcaccaacaagtgaattactgtccctccacgtactcggagcctttgtttcctgaaccgacactcttctga

SEQ ID NO: 144 - DNA, 1837 bp, Mus Mus
ctgcttcagccagcctaggagacacaggacctgctggctgcagaggtaaaagctggacctaggatggagcaggatctgaggagcatcccggcctcgaagcttgataagttcatagagaaccatctcccggacaccagcttctgtgctgacctcagagaagtcatagatgccctgtgtgctctcctgaaggacagatccttccggggccccgtccgccgaatgagggcctctaaaggggtcaagggcaaaggcaccacactcaagggcaggtcagacgctgacctggtggtgttccttaacaatctcaccagctttgaggatcagttaaaccaacagggagtgttgattaaggaaattaagaaacagctgtgcgaggttcagcatgagagacgttgtggagtgaagtttgaggtccacagtttaaggagtcccaactcccgggctctgagcttcaagctgagcgcccccgacctgctgaaggaggtgaagtttgatgtgctgccagcctatgatttactggatcatcttaacatcctcaagaagcctaaccaacaattctacgccaatctcatcagtgggcgtaccccgccggggaaggagggcaagttatcgatctgctttatggggcttcggaagtacttcctgaactgtcgcccaaccaagctgaagcgcctcatccgcctggtcacgcactggtaccaactgtgtaaggagaagctgggggacccgctgcccccacagtatgccctggagctgctcacagtctatgcctgggagtatgggagtcgagtaactaaattcaacacagcccagggcttccgaaccgtcttggaactggtcaccaagtacaaacagcttcgaatctactggacagtgtattatgactttcgacatcaagaggtctctgaatacctgcaccaacagctcaaaaaagacaggcctgtgatcttggaccccgctgacccaacaaggaacatagctggtttgaacccaaaggactggcggcgtctagcaggagaggctgccacctggctgcaatacccatgctttaagtacagggacggttccccagtgtgctcctgggaggtgccgacggaggttggagtgccaatgaagtatctcttttgtcgtattttctggttattgttttggtctttgtttcatttcatctttgggaagacttcatctggatagcccagagtgtcttggatattgccatcctcctgccttagcgctggcatgactgcagcgtaggcctgttatgctctgcctcccctccatcctcaagtggacaagaactgggcatgtgttttcctgtgagcccagtgggacctgtccaggaggctccagagtcaggggcatgtcctgctctgctacagggccttgacccagagaagacaggaaggtgcccaaagcccaagagagggagggtccaacctgtgatcagactccaggcttctgtcccctgtcctcaacccctgcacagacagcctttctcacagcatgctttatctgtcttgtcccccaacagtgttctctgggagacaagagattcagaaggagaatatgatggtttgtatatggttggcccagggaatggcactgttaggagatgtggccatgttggaatgggtgtggccttgtgggtgtgggctttctcttgtcttagctgcctggaagtcagtatgctgctagcagccttcaaatgaagatgtagaactctcagctcctcctgcaccatgcctgcctggacgttgccatgctcttgccttggtgataatggactgaacttctgaacctgtaagccaaccccaattaaatgttgtttttataaaaa

SEQ ID NO: 145 - DNA, 806 bp, Mus Mus
gcagagagccagacgggaggaaggccagcccagcaccagcaccagccaactctcactgaagccagctctctcttcctccaccaccatgcaggtccctgtcatgcttctgggcctgctgttcacagttgccggctggagcatccacgtgttggctcagccagatgcagttaacgccccactcacctgctgctactcattcaccagcaagatgatcccaatgagtaggctggagagctacaagaggatcaccagcagcaggtgtcccaaagaagctgtagtttttgtcaccaagctcaagagagaggtctgtgctgaccccaagaaggaatgggtccagacatacattaaaaacctggatcggaaccaaatgagatcagaacctacaactttatttaaaactgcatctgccctaaggtcttcagcacctttgaatgtgaagttgacccgtaaatctgaagctaatgcatccactaccttttccacaaccacctcaagcacttctgtaggagtgaccagtgtgacagtgaactagtgtgactcggactgtgatgccttaattaatattaaacttatttaacttattgatgttatggtattccctttcatgaatactaaaatttcttaaatgcaaggtgtggatccatttttccctctctgtgaatccagattcaacactttcaatgtatgagagatgaattttgtaaagatgaatgggtaaactttgtgtttgagattccaaggtattgtttaaaatattattatggatattccttattattaaaagaaatatattatttttgtacacc

SEQ ID NO: 146 - DNA, 591 bp, Mus Mus
atggagtactacgcagcgattaaaaacaatgaatttatgaaattcttggacaaatggatgtatctggaggatatcatccttattgagcgcgcgcaacaagtggtgctgagacccgggacgggacgagaagacccgggacgggacgagaagacctgggacgagaaacccgggaaaagaaacatcttcaggcaagagcgaagagcccctgctacagggaggattcagaactgcatcacggggaagaagcggttaataaaggttcccgtgaaacagactgttgagaaggatccggcgtggattcagaactcttcagctggggaacgagcagacgcgacaattggtggcccgtacggggaaccgactcccccaccgagttcagaactttcagcagttagtggttgctggcagggtaagttcacggaccagacggaacctctttgggtgccggagagattggtgagacactgcaagaatgagcgtcctgatccagttgcccctgtggatgtggtggatgatcccacaagcacaaaggatggagccgagatgagagatcctttcggtattccagaagccgataccagctcgacatga

SEQ ID NO: 147 - DNA, 1183 bp, Mus Mus
agtcgaccggaatccccgagaggagcaatggctctaacaatgctgctcttgctggtggcggccgccctgaccctgatcgagacccgcgcgggcccacactcgctgcggtatttccacaccgctgtgtcccggcccggactcggggagccccggttcatcatcgtcggctacgtggacgacacgcagttcgtgcgcttcgacagcgacgcggaaaatccgaggatggagccgcgggcgcggtggatggagcaggaggggccggagtattgggagcgggagacacaggtcgccaagggccatgagcagagtttccaagggagcctgaggactgcacagagctactacaaccagagcaagggcggctctcacacactccagtggatgtatggctgtgacatggggtccgacgggcgcctcctccgcgggtacctgcagttcgcctatgaaggccgcgattacatcgccctgaacgaagacctgaaaacgtggacggcggcggacatggaggcacagatcacccgacgcaagtgggagcaggctggtattgcagagagagaccgggcctacctggaggtcgcatgaggctccgcaaatacctgcagctcgggaaggagacgctgctgcgcacaggtgcaggggccgcggctggggctcagtcctggggaagaagaaaccctcagctggggtggtgcccctggctcagaggggagagagtgaccctgggtctcctgatccctcatcacagtgactgcactgactctcccagggctcagccttctccctggacagtgcccaggctgtctcaggagggaaggagagaatttccctgaggtaacaacagctgctcccttcagttcccctgtagcctctgtcagccatggcctctcccaggccgggttctcagcctacacccactgtctgtagacactgactcctgtcctgctgagtgtgtcagcccttacacctcaggacctgaagtctcctttacccgatgggagacatggacatctacactaggctggttcccccagtttctagaactttccaaagaatacagtctaccagatccttccctgtctgtggggtttgcatcctttgacacccaattctatctattcctgcaatggtgaatagtcacatgagccattatgggttaccctaaacaaatacttttcttgtgttt

SEQ ID NO: 148 - DNA, 900 bp, Mus Mus
atgactacttctccagtagaagtttgtgtcaatcctccatttttctttatattggctgaatttcaaaataatacagaatggttagattgtacaaatgtcacttgttttttgacgcaatgctggaatggaaccaaattcttagccttagtggttcatctaccaatctttgtccctgtgcctgttgaggcagatccagagaagttcccaataacgagtcttattcggcaaaagagaggttttggaatcacagctgccattattacagccattgtgatgtccgcggcatcagcagttaccgcaggaactgctatggcccatcaagttaatactgctgacaccataagtcagatagcagaaaaatcctctgaagcattgcttaccctgcaaaaggtggattctcatatcgcctcagggttaatgctagtgaatcagagagtggatattttacaacataatatggaacggatgatggatgtcatacaaatgagttgtgtggcatccacatcgcatgtgtgcattactcccaataagtatattaataattcttttattaaaagtacagacctatcgaattacctgaaggggaactggtcgcaggagctggagaggttgcaggcgagactgcagatgcagatcctcaaccttaatgggaccagagtggaaccagtgaccctcggagactttacctcttggtttacctctgccttttcttactttaaggaatgggtgggagtgattttgtttggtgctgccatatgctgtggactggcgttcatgctctggttggtatgcaaattcagaacccaacaaaaacgtgacaaggtgattgtaactcaggcacttttagctattgaaaacggctcctcccctgaaatttggttatctatgctcaagaattag

SEQ ID NO: 149 - DNA, 5735 bp, Mus Mus
gcatttcgcttcctccctcctgcaaggccagggaaccatgtgttggcgggattaatctttgcccacaatgtctctgcaaaggtttctgcagcggcagggcagcaatggcaatttggagtactgtgctgactctgcctacggctcctactccgtcctcacgggccagctcacgatggaagacaaccgaaggattcaagtgctggcagacactgtagctactttgccccggggacgaaagcagcttgcgttggccagatcaagctctttgggtgatttttcctggtctcaaaggaaggttgttactgtggaaaagcaggacaatggaacatttggatttgaaattcagacctacagactccagaaccagaacatctgttcctcagaagtgtgcactatgatctgcaaagtgcaggaagacagccccgctcactgtgctggcctgcaagttggtgacatctttgcaaatgtcaatggtgtgagcacagaaggctttactcacaaacaagtggttgacctgatccgatcatcaggaaatctgctaacgatagagactcttaatggaacaatgattcacagaagagcagaacttgaagcaaaactgcagactttaaagcaaaccttgaagaaaaaatgggtggagctcaggtctctgcacttacaggaacagcgcctgttgcatggagacacagcaaactccccaaatttggaaaacatggacctcgacgagtcgtccttgtttggaaatctgctggggccgagtccagccctcctggaccggcatcgactgtccagtgagagcagttgtaagagttggctgagctccctcacagtggacagtgaggacggctaccggagcagtatgtctgaggactccatccggggtgccttcagccggcagaccagcaccgacgatgagtgctttcactctaaggatggagacgagattctgcggaatgcttcttccaggagaaaccggagcatcagtgtcactagtagtgggtccttttctcccttgtgggagagcaattactcaagcgtgtttgggaccctgccccggaaaagcagacggggtagtgtccggaaacaaattttgaaattcatccctggccttcatcgtgcagtggaagaggaagagagtcgcttttgatgggctgctgcagaccttttgaattggcttgtttcacaatcctctctctacccgccaagatgaacccctggcttagtgggaaagtacagatagactgtgaagctcacatcccatctcacagcagcagtgacctttaagttcttatattgttatttttggggtcttatatcagaggtttgtttttgttcgtttgtttgtttcaatcagtagtgttcaacttctaaacagacatcacaagaggaaagtaataggttaaataatgtaataatatgtctgctcattctaatgctggccaggaaagtacaaaaatatttattatactgaccatgcatgtaaaaagtggagaattcttagatcaagtaagaatatagaccgacagaatataattattgggttgcttttaatatgttaatttgatagactacaaaacctcctatttgcttcatttactctgtagcctctgggagcttgcccaagagagaattaaaattgttttcaaaccattaaaggatcataaaacatagcatcatacgcatcttctcacttcagcagtgacagtgaggcgggagagatgcctagtattggtgcagaggagagctcttggtgctgggatcctatgccactccccactccatctctaaacagagtgagtgagactctcattattttcgcccatttcaatttttattttctgcctgaacattcatgccaaggccagaaatctcaggatcaaatctatagatctgtgattgtattttctgcaaatgtctaaaattctaaaaatgagaatggggaaggaacatttcttctgtatgtttatctcctgctacacctcattaaacattccacataggtatcacctcagctcgaagttccttgttagctgtgcttgtattgtactctcacctgtcaatcatgctctatgttatttcaacatccattaaactctgttctggtgatacagctgttcattacctgtatgctcaagtaaataaccatgtgataaagacttaggttgattccaagcacactctctccctccaccctttcggggtgtgtgtgtgtgtgtgtgtgtgtgtgtgtgtgtgtatgtgtttgtgtgtcttcaacagagctgatacatttaagtgaatttctagttggtctatagaaagcaattttgatttttaaaaaagtgaagtaaagtctgtaggataataagtagtaaaatttatctaagtgggacctgctgcctataaactctttgaactaagacacatgttttttttgttttgttttgtttttttccgtgtgtgttattcggcacacttctcaggtataccagcagtgctgtctcccaaatatggagtgtaaggcagtctaaaagcaccttagaacaactggagacaggatacaaaaaaaaaaaaaaaagaaagaaagaaagaaggaaagatagaggggaggggagaggagagagagagagagagagagagagagagagagagagagagagagagagagagagagagagagatcagggatgcagagcctgtggtcatggcttgtcagtgttgtcctggctagaagtgaaagccatttcttcttggatgtagccaatactcttggcttctttaggaatcgttactcttttgctggttctggtggagttatattagaacaactggagctttctcatcagggttgtgtatgatacagggacttaaaatgtctgaaactcaactctcaccaaaaaaatcaacagtggcttttgagttgtctcagatgaatagtaatggcacagactcatgtgggagtaaaactaacaagctttattgtggaaagatggggaaaggtgacaaatcaaaggggaaactcctgaaaacaggaggggttcccaagaatgaaaaagccctgaaaatatctgtctagaagtgttttttttttcatttttgtttataggatttacaacagaaattgacaaagactgtgatcatttctattgagatggatcagttctctagggtatcatggcccatgctaatagaggaacaacacactctgagcatatcttactgcttcaatcacgggaatgatcatgccctgtttgcatgctgcccactctatccagagtacttgcagagttccagctttgttcatctctgagttctgttagttagctactggccttgatttctgtctgttagctgatagccctctcgtcgttgatatcgtagttatattgccagctgttaattaaattgtggcctctatatgatcagtttgcactttaatcatttcagagggaaaactcaatcaaagctacaaaggtgtagctgcgactgtccttattacttcatgttaggtctttgcttatggggcagtctcctttctgaattagatggacacttcttattagaagatgtactacctacattttagtctgtcacagttgaaacacaagcaagactatagggaaggacaactgccttgtttatgttcctgcagtgctgcaacctgcaagggattgacctgactcggacactggaatgatgtaacaacagacataggaacagaaaagctggatagagtaggtcacgtgctttgatgaagatgttccagcatccagcaaactcagcatgcttgtgacatagcttaacaaaggtgtgggttagctaatcttggtaagaggtctctttgtagaggaacagtctaaggctgcagatatcccagaggagaaagccatacttgatactttcacacactgtcaccatctatattctgaccaggggaaggccttgccatttctgtgggtctgagacactggggtcttttgacatggtagcactcatgtcaacatacacatcatctctagactttatccattcccccaggacattggctgtcgggcctgctagtcctgaccttactagccagtctatgttccttgtgtctagtcaaaggttttaaccccaacctttttatttttaaccccagtgtctgttttgaccttcccctttgtgatcaacaaggaatcgtcaccatgagccccttccccttcctacctgcagagtgatagcaacagcctcagctcgatgaacttcccactgtaatacttttaattcacctgccagaaaatattaaaatataaattgttgagccaatagcgaaatatctcgtggtctctggagagtaggacaccaacaatttagggtgattcttttcttagctttcattagcaagctttcaaatacagtacataagtacttagatgctacaacacattacattttctttacaatacattaattaattgcaatacattaatgtttccttaagagttttaaaacagttatcattgagctagcacagcattttcttttcctctttttaggactatcatgctaaagatcagcttacatgaatacagcatcttgatctccgcccatgacgtatggggaagagatgtgcgtttatatgggtcaaagtttcccgaaagtgagaacctgttgcagagccacttcagatcatctgagaaagcagagcataggtcaccggcttctcttgcaaacgtctgttagtaaatgtcaaatgcaaagtggggaccaggaagggatggagccagtaccaagttcatttgtgttgagaagaattagcatcaaaaggtagacctgtgttcttggggttggaggagaggaagcaaaactggttaaccagagcacaggaaggaaggctatgccatgtgcttagtgttcacaagcagtttaatgtaaatgtaggggaatttcataccatgttttagtctgtgtctgacctgagtgggaccttagaagaagctcctgtggcactgtggctcacttggatgtaatttatggggaaaataccttaaaagccgttttacttttttttttttaattttttgaattctgaagttgtcaggtatgtaattttggtgcattgcactaattgacaaatcgttatgaaactactgttttctagaacggtgtctgataaaccaattctgagtcatgccgattctgaactgcataatcactgagctcaaagactagggcacgaaacaagtaggagagaaaagagttttctctttttgatactttatgtgtctgagtgctgtacctgcatccatgtgtgtaccgtgtgctggcagagatcagaatgcatcagagtcctatagaacaagaattacagatggttgttagcctcggcgtagatggtttgaactgtgtctggtcctctgcaatggcatagccactgagccatccctccagtcccagaaaagagttttttaaaaaaattaacaactttaactcaaaacattctacttttaatacttttatatcttatgtgcatgacacaaatggtaacagaaacatcaatttgaatcaaagagactgaacttaaatctagtttatgtgcactcttgatgaagtgtgcttctgcatgtagacaaagtagagtaactaatatgttactaggctgagtccttcaggttacaaacactgttgcttgctgtctacttgcatacagaattgtggactcccaaatgaaagtatttatgttctgaaataaagaatgcttttttggctatcag

SEQ ID NO: 150 - DNA, 8643 bp, Mus Mus
ccgcccctcgcctcggcccggcctcggggtccgggcggagggtttcactgtccgcggggcccgcgcctctgtgcttctccacggtgccggctgcgcggagccgggatgcgctgcgcctgctgcgggtcctcattatggagcccaaacgcctggagattcccggcagcgtcctggatgatctctgcagccgatttattttgcatattcccagtgaagaaagagacaatgcgatccgagtgtgcttccagattgaacttgcccattggttttacttggatttctacatgcagaacacaccaggattacctcagtgcgggataagagactttgccaaagctgttttcagtcactgtccatttctgctgccacaaggtgaagatgtggaaaagattttggatgaatggaaggaatataaaatgggagtcccgacttacggtgcaattattctcgatgagacactggagaatgtactgctggttcaggggtacctggcaaagtcaggctggggattcccaaaaggaaaagtaaataaagaagaggcgcctcatgactgtgcggcgagagaggtcttcgaggaaactggttttgatataaaagactatatttgtaaggatgattacattgaactgcgaatcaatgaccagcttgctcgcttgtacatcattccaggagtcccaaaagacacaaaatttaaccccaaaaccagaagagaaattaggaatattgagtggttctccattgagaaattgccctgtcatagaaatgacatgactcccaagtccaagcttggcttggcacctaataagttttttatggccattccctttatcagaccactaagggactggctgtctcgaagatttggagattcctcggacagtgacaatgggttttcctcagctggtagcacaccagctagacccaccgtggagaaattgagtcgaacaaaattccgccacagccagcagctgtttcctgaaggttccccgagtgaccagtgggttaagcaccggcagccactgcagcagaagtcacacagtaaccacggggaggtgtcggaccttctcaaagcaaagaatcaaaatatgagagggaatggcagaaaacagtatcaagactcacctaatcaaaagaagagagcgaacggagtccatggtcagccggcaaagcagcagaatcccttggtgaaatgtgaaaagaagctgcatccacggaaacttcaggacaacttcgagacagatgccacatgtgacctgccttgttctggtgaagagccgtcggtagaacatgctgagggacattctgtggcatgcaacggacattgcaagttcccattttcatccagagcctttctgagtttcaagtttgaccaaaatgctataatgaaaatcttggacctttgagccagcaagagtattgcagaagtccctcgatctgagacctgttgcgtgtgagtggctgtctcctcaagccttacctttctcaggtatctgaaagaagtgcagggaggccatgtttctaaagagatgttctgtacagacgagaaactagaaagaaacacaagtttgcactgtaaatgcatttagaactttttatatggatttaccatttcagtgtttggaaccaagttttagttgcctgtgtttttttttgtctctcccttatttttgtgtgactgtgttttgttttatattctcatcaagagttgttttgattgcatcatcagcaagtagccatgtcaataggagtgtttcacctccccatcttagtgattgcaaaaagcttgcttattgaaaacttaaaggaacttaaaaccccagttaccaatgtactgggcatcagagctgaaccgtgaggtgaggatgcaggcgtttactcatctctgcctctaaccactgagagtctaaccttccaactggagctgcacagtgaacctcgagcacttcatcaggaccacatccacagcctggagagagatggagtcagtggggagctgatgctgtggatattgagctctgatgtttgctgtcaaaaacctgtgagtgctggagcagagagcatggaagcaatagctgacagttactccaggtcatgccttgactctcctgcctccgtccgttcagtattgtgtcgtgattatgcctgtgtgaaacgtctatgcgtattctagttgtgagtctgtgtggaaaacttcattcttagttctatattgcatctcaacgttgatctgtgtaagctggtattatgttaggttccagtttgcagtaatactagactgacatgcttttcattaatatcttgaagcccctgagttacaacgtgagaaagaaggggatctgcagtttaccagtaagtccagcatgtcactaggggaccgacccttgaagtaatgtacttagatcacacgtaggaatgtattttgtattttgctccttcagaattcttaaaccaaacacgggtgacagtgcccactttgcagagatcgcctgttgttgaggacaatcaccagagctttaaggaggcaatatgatgttggctgcccctgacctcgctgagaatctcttctggggtggactgtgctgttagagtgcatgtgtacacgtgcgtctgtcgtgtgcggttttaacaagtggtatccacaaagtatatctctgcttataaatagtactatagaaatctctatgctgtatatgtagcctatttaactgggggttctgcctaaccccatgggacttaaaaggaagggctattattgtaaggaattcacttggtattactactttgctttagcttttaaatgactgattttaaagaagaaattatatttattcatgaaagtgtcactcggtgctaagcaggagacttcacagtgatacagtatgtttggaatcttctatgcgactactttgtgaatccttctgtgacctttgctttttaatgcattatatgattgtgtttggaagcccttactgttcttgtcagaaatacagctgctttgcttgggtcttcttgagccatatttataattggtcccagcattccagatttctgttaaatggttaagggagtgaaaactgaagcttgcctggcagtgagccactgtcactccctgactgtcaccaagaaaccattgtgtgtgtgtgtgtgtgagagagagagagagagagagagagagagagagagagagagatattcttcttaagtgagcacttcagtcagtccctggtgcctgtagaggttggattctcagctctccatactagagcaaaatcaactagctagcacaaggtccatggcccttaaagtggttgactgtaagaaccaaccagtgatgtgctgcttcatttaatgcactgtggaacaaagcaagggcatggttggggtgcatttacaataactttaggctttaggtctctcaacaggctgaaatgttgagagagtaaggtttgtatgtgtgatgtgactcaactatgcagaaaatgttaagttggtgttcttgttaatgtaagtccagcgtacacacttcttcactgtacagtttagctgggagaccatatttagcacaggacgggatttcttctctgagctatgttagcgtttcttcataggatctagtgatgaggactctgaatatgcagtaatgtgcttctgtgtagtgccgcatttagagacagactctagagggaacagtagatacgtcggccttattattatttgtgtttgagaggtgagactttaaaatcgcttttaaacatccttaggatccaactgcatgtgttccgaggtgcagtgcactgtgaatctttttaagtctaagtttgtaggtgcttttatgtgtaacttaagtggttggaagaatgtttaataactttgtcctcaaccattgtactcaaagagacaaaggatacagtttacatactttctgtaagattttgttaagaaatagtgaatgaatgactctaggatttcaaacagagattccatcctgagacatgagcacttggaggggctggaaaacccaatagatcggatagcttggaaaacttggtgagccatgttgaaagagctaactagatttctgtaccaatatgtgaaagatagttgcccagaactgtcagagggattgtggtcactgcttgctgctttgacctttgaatatcattatttttatattaaatactaattagtaattagctatatagcagattaatattatgctgtaagacttggctaggctttttttgggaggctttaataatttacatgtaatgtcaataaaaatacaaatctaagagaatggccacaggaatcagattcctttataaaatactgtgttttctaaaaatgtcaaggactggcacctgtgtgcattaaaaaacatttcattaccaaattccttaccagtcctgtttctctagcattagttcaacagtaaggagagagtgggacctcgaaatgataactggctggacaggttttattcccataatgcctcttggcctttgctgtgtctatgcgtgccatgttggagattttaatgacagctgttgtgtccatgttctctgaggcagtattttctttgtattattattcatggttgtattcattaatacttcttctgtttttgagttgggttattgtgtattattattattgagaaaagaggttcaaacgtgttataactagaattgaccatcagcaaaggacaccactcccaggtctaatggtattcttcacctttgtgtatgtagtgttactccttagagctcagtacagctggtgtcctaacacttcagaatacatttgtatagtttcttaaaagcctagaaatgggcttatagaaggcctctccacaccttcctatcaatatatgtaggattgtcactcctgaagcctaggtcagaaggcaggttgagatcagcagaatgagatttgtcataagggttttgctgttttaagtgtgttgtgggaaaggatcttgaaaagaacagatagcagttgctgggaggagtgaggaagaaactactacgcatttggcacttgagtgcttcctggaaggatgctcaggggagaaatgtggtcaccccctgcccaagcagaattgagcatgcagttctttccaggcattttctattccttggtgaagtattgttttctaagtatgatcgccaagcagtccatggttgctaatggaatttttttcgctctaaggaccagtgttcgagtcctttctgtgttgattctgtcaagctctaggctgagtttgggttttgtttgtttgtttggtttgtcattactttaatttgtttttaatgtgtatgtatgttttgcctgtatatttgtttgtataccacatgtgtgcctgtggtgcccagggaggtcagaaaaagtgtgtcggataacccgcccccctccaccccccggaactggggttcagagcaattggaaatggaacccaggccctctgccagagctctcaccctctctgttgttgataacaaggtagcccagagtgttgcacagtcatgtgcaaatgctggcagcactttccttgtgacaaacagcatttgtcactgaagtactctacagccattgaataatggagactcagcccaccctcctgggtagaactggatgaaagggcatttctgtcaacgtagttcatcaggaaggttgtttgtttaggttttccctgtatacatctttgtacttcgtgttaaagctcagaggcttcattttgagacatgttcagagtggaatatctaatttgaagccatccataaagagattacattaatctggagtcttagtgtagcacaggggttgggtctgtgtctctgtcacagtttaaaaggaattcacctcaagatgtgactagttgggcaggattgactaagggccctctgggaaaaggaaccccaggagtatcagtttcagggtgtgacttggtcctcctagtggacatcagctctttggtggaaggtaagtgtgtcagctagggggcgggggtggttttgttgatattgttactagtttgttaagtgtccttttctgagcatctgtttcagtatttctcaggctttttgtttgtgctacgtctctaatacatctgacaccatgagaatttgctgtaagtttaactcctgagcctcaagtagataaaagggctgtgttctctcaagtcagtgtctatagctgtgaaattggtgtgggagcacagaaaacactttgaggttctcgttggtagctttagagtggaacgggcagcatttcctaacactcagttcttaggatagtgagcttttaaagtagaaggtagggtgctttctaattttaattatttgatccaaatgtgtaaaacggtagctctagactggtgaagcatttgggacacagttggacattttaaaagccatttctcaagctttaaggcatttagcacagcctttgcagtgctcagcagaggcgcgaatgcaagcagaggcgcggccatgaggtcggtgtccgacgctggccgtggctggagagatgcagtaatacttgtggagtgtgagcggcagtggataggacacgtgacgtgcacggtgccttgggagagcatgggctggtcctgcaggactctgcatttcactgtgactgtgcagcacattttaggctgtgtttgaatgtctcacaagttactgttaagtgtcaaatgcaagaatccaagaaggagctgagcctttcattttacatgttgtttgaaattaggacaagagacaattcacttctgttgtgtaaatagtaatttttttttcagttcagcaaatagggcaaaacagtgaaaccattaacttctagtttttgaaaactatttttttatatttactgataagttttaaatcttatggtagttgtaaaaatgagtattgacttactagacttatgtataattcaaataatctgttggcttcaatgaaaccgtaatgaatcttcatgaatgttcatgtatttagctattttaagtgatattctcttaatttggatagtcttaggtcaggccagtagagatgatgcccacctgtaatcccagcacttgggaggcagaggcaggagagtctctgagtttgaggccagcctggtctacagagtgagttccaggacagccagggctacatagagaaaccctgtctggaggcaggggttgggggtggggttgggggggtgttgtgggtggaaaatgggcgggggtaagtttaacaaaattgaagcatagtttgggtgcaaaagtgaataaaatttggatatttttatgcactgtgtctttggtttgtagtagtttacactctgctgtaaagacctgatgttcctaaacagtgtagttttcaaacagtttaattctaggtatgtctgggaaagttgtaaacatgcagagtcatagaagctacaaaaagctggtacatgaattttggtgaaattgcttcattaatgatacaatattcagtgaaaaacctaggcttcagaataagtagatttgtaaactgtttcttcattaattggttttgtcttatataaaatgatttaacatagaatctctgccagacttataacgacgctttatattttattgggagaaagatgtaagcaaatcctttacatgattatgtctatgataataggaaagtatttgctttactgtagttattagtcaaacatttagggaaaccaaagaggaacccccaaaatagctcgttgggtttactgtagtgtgacaacatcctttagtgctacatttatttagtgagcccctcccccaagtttggtgtttatgaataattggaactgcttttcacctacatcgatgtaactcataaatttctagtgactcgggtctgtgaattagtgatgctggagcacccaccgcccttccaaagatgtggggtgacccgacacctgtgctgtaacatctaacagcttttcagtgtgatgcacactagtttaggagctaaaaccatactgtaaagaatgcactgacagtgatggaaggccacccacgctggctttctgtcgaatactgtgagctttgctctaactctgtctgtaaggaattacccataaactgggctgcttgggcacagttactgctctgcctttggttctgttctgtttaaagtcattgctgttactggttattactctggaccagaaaggctaggaatgtataggataaacatgagaagttgttcgcattcatagaaatataaaaggtagaatttattcagagatgaaagtggcctgtgggaatgtcacctttatctcaggtcggcttggctcttaagctgcagtacagtggtgggcaggagataaaaatccgacctgtaacgtgcagtggttcttaggcttgagccagaaccaggcagaatgtccagcagagtgtcctattgcccctccctctcaggcaggagagtcctcagctacgtaactatgttgtcatctttccatggagcagaaagtctgtgtttcgacactcctgatgtgctatgaaactgcttgctatctcctaggtttagacttcttgaaactttttttcctgttttcagtagagaaacttctgtttatgctgtatgtgaagacaaccaaataaaaattgatgataaatgagaa

SEQ ID NO: 151 - DNA, 3882 bp, Mus Mus
ggggcgcctgcgcagtaggcctggaggctggcaaaactgaatggactcacttttggggtgtggtgtcagtgcggctgcgcgcgagccggtgccgcggtacttaacttcgcagccccgggtgtcggaggtagccatgcagagcgcacccttggagcagccagctaagcgaccccgctgcgatggcagcccaaggacgccaccgagcactcctcctgcaacagctaatctgtctgcagacgacgacttccaaaacaccgacctccgaacctgggaaccggaggacgtgtgctccttcttagagaatcgtggtttccgagagaagaaagtgctggacatcttcagagacaataaaatcgccggctcgtttctgccctttttggatgaggatcgtctggaagatctgggagtaagttccttggaggagaggaagaagatgatagaatgtatccagcagctgagtcagtctcggattgatctaatgaaggtatttaatgatcccattcatggccacattgagttccaccctctccttatcagaatcatcgacacacctcagttccagcgacttcgctatatcaagcagctggggggcggctactatgttttccctggagcgtcccacaatcgcttcgaacacagtctcggagtggggtacctagcaggctgcctggtgcgagcacttgccgaaaaacagccagagctacagatcagtgagcgagatatactctgtgttcagattgcggggctctgccacgacctaggtcatgggccattttctcatatgtttgatggaaggtttatcccacgggctcgcccagagaaaaagtggaagcacgaacagggctccattgagatgtttgagcatctggtcaattctaatgaactcaaacttgtcatgaagaactatggtctcgtccctgaagaagacattacctttatcaaggaacaaattatgggaccacctataacaccagtcaaagattccttgtggccgtataaaggccgccctgccacgaagagcttcctttacgagatagtgtctaacaagaggaatggcatcgacgtagacaaatgggattattttgccagagactgtcaccatcttggaatccaaaataattttgattacaagcgcttcattaagtttgcccgtatctgtgaagtggagtacaaggtcaaggaggacaagacctacatccgtaaggtgaagcacatttgttcgagagaaaaggaggttggaaatctgtatgacatgttccacactcgcaactgcttacaccgaagagcttaccaacacaagatcagcaacctcatcgacataatgattacagatgccttcctcaaagcagacccctacgtggagattacagggactgccgggaagaagttccgcatttccacagccattgatgacatggaagccttcactaagttgacggataacatttttctggaggttttacactctactgatccacagttgtctgaggcccaaagtattttaaggaacattgaatgccgcaatctatacaagtatttgggtgagacccagccaaagcgtgagaagattaggaaggaagaatatgaacggcttccccaagaagttgctaaagccaaacctgaaaaagccccggatgttgaactgaaggccgaagatttcatagttgatgttatcaatgtggattatgggatggaagacaagaatccaatcgatcgtgttcacttctattgtaagagcaacagcaagcaagcggtcaggatcaataaagagcaggtgtcacaactgctgccagagaaatttgcagagcagctcattcgggtgtactgtaagaagaaagacgggaagagcctggacgccgccgggaagcactttgttcagtggtgtgcgctcagggacttcaccaagccacaggatggtgacattatagctccactcataacacctctgaaatggaataataagacttcatcttgcctccaagaagtatccaaagtaaaaacatgtctaaaattttaagtgaatatctgcggttagttcttttcaaaaacctctttccctcttcacaattaagttaggaaatataatccgggcccaccaatgacctttatttagtatctggaatgtattctcgtgctggggtgggggggtctcgttttcattcaaaatgaaaaatggtaacattaacaaatttttcctatctagcctgtggtggtttgactaagaatggtcccataaggtcatataattcaatgcctggtcaccagggagtggaactgtttgaaaggattacaaggatcgagacagtgtggccttgctataggaagtgtgtcacagaagatgtgcatgctcttgtactctctctctctctctctctctctctctctctctctctctctccctccctccctccctccctccctcctgtccatcagctaccacacagcgcctgttcctcgccatgatggtggattaaccctctgaagctgtaagcacacccccagttaaccgctttcctttataagagttgccttggccgtggtgtctcttgactgagacagatgctgtaagaagcattatctggtgtatttttagcactgactgaaacctttctcctttagcaacctatttcccaggataactctcccatctatcctgaactcttgggacaaaggattgccttttgtttttaaatcaggaattgagacaagggtacaaactagaatggaaattgtgatgcgccgtgtagttaaaaaaaaaaccaaaatcccagcccactgaagaggtgcccggcaccctgctccccccacaacaccccaccacttccatccctgttaagtgccaggcatggggggcatcgggagcagttctttcctcagaggagctgaggtgtgtcaggcgggtactctaccgatgacctcagctccatctctgtcttcctggtacaactccccctgtcccctgctttaggagaggctaggttcagaggacacctcataccaggctactcctgagtctgtcgtgactccagacaaaatcagagttttaaagcacctgcaacccctccagccccaggggactcactgctgccagcctggggacaggtcttcgcccatctcttctgagctgaactggtcagctgaccaccgaccccaccctctggctgctctctccggcaccactgttgctgcagtgtgtttacgggttttagaacattctggactgcctttgtgagcttagcagactgcgcagtgagtctcaggttctctttgtagcttgctgttcctaccagtgccgagccgctgtggttctccctgctgcccccctcacccccactttgcacagctttaccaggaattgagtccaattggagccaacagtggtcaacagaaatgctagagatgcaggcagtggggacagaggcaggagctggaggcgacatcttagtgatgatgctctcccgggcgagcagccttgtgctgcctctctcctccgggtagccacgttctgtcttgtccactcatgggtgaagagtatttggtgtgtctgccactatggggtcataaatgcacacgggaggtgctagctcccccactagccacggtgcctctgtagatccacgagacagctaggggtccccctcccctttgtgtgcccagactcaaggttaagaagtggaaagttttctgcgaatatttttgtatttttgccagtctatattttttaaatcattatggtttattgtggagttttgtagtcctaattttgtaccatggtatgtgggaaacaaatctgacccattttctgcctttgatgctgttttccttgtgagtacctgtgtcgtttacgagactgcattaaaaatggagattttaacagcttaa

SEQ ID NO: 152 - DNA, 2013 bp, Mus Mus
ccagcttttcccagcagcacagaaacagatcaccatcatgagtgaggtcaaccgggaatctctggaagcaatccttccacagctgaagtgccatttcacctggaatttattcagggaaggaagtatgtccagtcatatggaagacagggtgtgcaaccagctcgaacatttaaactctgaggagaaggcaacaatgtatgacttattggcctacataaagcacctagatggcgaaagcaaggccgccctggagtgcttagggcaagctgaagatttaaggaagtcagagcacaaagatcaagcagaaattcgccgactggtcacgtggggaaactacgcctggatctactatcacatgggccgtctctcagaagctcaggcttacgttgacaaggtgagacaagtttgccaaaagtttgcgaatccttacagcatggaatgcccagaacttgaatgtgaggaaggatggacacgcctaaagtgtggaagaaatgaacgagcaaaaatgtgctttgaaaaggctctagaagagaagcccaaggacccagagtgctcctctgggatggccatcgccatgttccgcctagaagaaaaacctgagaagcagttctccgtggatgctctgaagcaggccatggagttgaatcctcagaaccagtacgtgaaagttctcctggccctgaaactgctgaggatgggagaagaagctgaaggggagcgattgattaaagatgctttggggaaagctcctaatcaaacggatgtcctccaaaaggcagctcagttttacaagaaaaagggtaacctagacagagctattgagttacttggaaaagcactgcgatccacagtgaacaacagtcccctctactctttggtcatgtgccgttacagggaaatactggagcagctacagaataaaggagatgctgacagcagtgagagaagacagaggatggcagaactgagacgattaacgatggagttcatgcagaagactcttcagaggaggcgaagtcctttgaactcctactcagatctcatcgatttcccggaagtagagagatgctatcagatggtcatcagtaaggagagccccgatgttgaggaagaagacctctatgagcgctattgcaacctccaggagtaccacaggaagtctgaagacctcgcagccctggagtgtttgttgcagtttcccagaaatgaaaggtcaatcgagaaggaagaggttaaacagcaaacataggaagcagatcttaaactccagtatgaaattttggtggattcttggcagttgcagggataaatgagtggctgaatgggttaggggtttgggaggcaacacactttggggcacaggcaggcttttcctggcaccatgaacctgaggacaaccggaagtgtgtcagagtgcagacagacagtctctcagctctgtactgtgagacagatgtgctgtgcagtgctgcttatggggacaatgggctggaaaagcatgagccttcctgccaaggattgctgacaagctgctcttgattgtgtctttaaggaactgctttctctccctgactcctctggtcatcctagccatataattttccagtcagcaaacctcattactaatcatgtagggaatggggcttaaagctcacagaccaccttttgatcacattttttctctacaataaatgacaactgccaacaaaattcattctagtttcttaattccatttcactgtagttgcttaaccctgaaggattaacctttgcccaaggctagaatattctttgcacatcatttttgtattctactgtggttttagggctgtgtgtgtgtgagtgtgtgtgtgtgtgtgtgtgtgtgtgtgtgtgtgtgtgtgtgtatcactaacaattattctagagtttacatatatgccaaatggaaattgtagaataaatgtaaaagtttcaattaaaatagagtcctgtgtgtggtggtaagagacagcaaaataaaacagtcatatt

SEQ ID NO: 153 - DNA, 2258 bp, Mus Mus
gagcctttccacgctctctgtccaaagctggcagtgctattcctgggtctctggccgctgaggtatgcactgctctgaagtgctctgaagtctgtagagggtcgctccgctagcctggatgtggcatgtagtagccacaacccagaagacactaggtgggggaattgcaggggaaactggggctccatgctgcaaaacccaaagccctttgccatgaaccactcagccccagggattcccccaccaccccgccgtgtgaggctgaagccctggttggtggcccaggtgaacagctgccagtacccagggcttcagtgggtcaacggggaaaagaaactcttctatataccctggcgccatgccacgaggcatggtcccagccaggatggggacaacaccatcttcaaggcctgggctaaagagacagggaagtacactgaaggggtggatgaggctgacccagccaagtggaaggccaacctgcgctgtgcccttaacaaaagccgtgacttccagctgttctatgatggccctcgggacatgccacctcagccgtacaagatctacgaggtctgctccaacggccctgctcccacagagagccaacccactgatgattacgttctgggagaagaggaggaggaggaagaggaagagctccagagaatgctaccaggcctgagcatcacagagcctgcgctacctgggcctcccaacgcaccctattccttacccaaagaagacaccaagtggccacctgctctccagccacctgtagggctgggtccccctgtcccagacccaaatctcctggcccctccctctggaaatcctgctggcttcaggcagcttctccctgaggtcctggagcctggacctctggcttccagccagccccctacagaaccactcttgcctgacctgctgatcagcccccacatgttgcctttgacggacctagagatcaagttccagtaccggggacgcgcaccccggaccctcaccatcagcaacccacaaggctgcaggctcttctacagccagctagaggctacccaggagcaagtggaactctttggccctgtgaccctggagcaagtgcgcttccctagcccagaggacatccccagtgacaagcagcgtttctatacgaaccagctgctagatgtcctggaccgtgggctcatcctgcagctgcagggccaggacctgtacgccatccgtctgtgccagtgtaaggtgttctggagtgggccctgcgccttggcccatggctcctgccccaaccccattcagcgggaagtcaagacgaagctctttagcctagagcagtttctcaatgagctcatcctgttccagaagggccagactaataccccaccaccttttgagatcttcttttgctttggagaagaatggcctgatgtcaaaccccgagagaagaagctcattactgtacaggtggtacctgttgcagcccggttgctgctggagatgttctcaggggagctttcttggtcggcagacagcatccgactgcagatctcaaacccggatctcaaagaccacatggtagagcagtttaaagagcttcatcacctctggcagtcccagcagcaattgcagcccatggtccaggcccctcctgtggcaggcctcgatgcaagccaggggccctggcccatgcacccagttggcatgcaataatgaggctacagatagtggctgccttggacctcctgggacagccacgtagactgatatagcaatgtggtggccccagcaggcctggctggctacagggttctgagtctcttggaagcagagtcggggtaacaagaacatagaagagaggcctgaggtttcatttcccctaaacattttctatttgagcaccaccttctggtgatttctctaatatgcctggctgggaagaaatgaagccagcagccccagtgggagggagggaacatcactagcctgaggcctttagtaccacggagtccaattaccccagggtagccaacttttaaggttgccccaattcttctagcaaaacctgccaaggagtgttgtgggggctttctgcagagaataaccctgatttaggggtcccctagtttgaacctttcccctcatccttatgacaaggatttctccaggcaccctccttcagagtctgagatgctgggacagaaagtagaatttaatatatttttggattaataaatgttaaaaaccaaaaaaaaaaaaaaaaa

SEQ ID NO: 154 - DNA, 2292 bp, Mus Mus
gctcttgccggcttgccgcacctcactagcaagtccgtttctacaatggcactaggattccagagtgtactaaaaaccagctgagacatccagccctgtggactgagcagctacgggagtctccaacctgccatgcgtagacagcctttgttggactagctaaaccagagtctcctggtcacctggtgagctgtaaggaacagctagctgtcaagtcctctgcctgacacctagacctggcagctgccatggacaccccagacagagaatgctttgttgagagtgtggttaactacctcctggacacatggagcacagaggacctgcggctcctgctgacagaagaagaaacctggaaacactttgtggcagaagttgatttgtccagggaagaggaagctgccttgcaggaatctcttgctgagatctttgcagatcctgatggagaagatgaagatgagctccaaaatgaccttcaggacaagaacgagaggaaagaggaagattccttgagtgaagatcttggtgagagtgtagctgatactgatgtagaagatgaagatggtgatgcagaagatgaagatagtgatacagaagatgaagatagagatatagaagatgaaaatagtaatagagaagatgaagatagtgatacagaagatgaagatagtgatacagaaggtgaagatagtaatacggaagatgaagaggagatccaaaatgatctgtggcacaaggaaaggttcttggatgcttatcctcaggtgaaactggagcttgaggagatcatcaggaagctccacgccctggcagacaaggttgacaaggtgcacagggactgcaccatctcacgggtggtggccagctccagcagtgctgtgtctggagtcctgatcatccttggtctgtctctggcacctgtgacagcaggagtcagtctggcattgtcagccactggcttggggctgggggcagcagcggctgtgactagtgtttccacaagcattgtggaaaaggtaagtgtggtgtctgctgaagatgaagccagcaagctggtgccaaccaacaaagacacaatgaagggcatgaaagaagttttggatcagagtggtcccagacttctttctttatctacagacaccattcagagattgcaaggcattcagaaatgcattaatgccattccgctggccaaagccaacactcgcctagcaaataatgccaagcgtctcatgaccacagggaagatatctgcccgaaacactaaacaggtgcagaaagcctttggaggtaccgctctggcaatgaccaaaggagcccgaatcatgggtgcagccactgcaggtttcttccttctgcaggatgtgatcagccttgtggaagactcgaagcatttgcatgaaggtgctaagtcacagactgctgcagagctgaggaagcaagctcaggacctggagcagaagttacaggagctcaaagaggttcatgacagcctgactaagtgacctcttcatcttctgtgcagctcagatgactggggagggagtgtgctggacagagccatgaacacatgggagcccctgactgtacccctcacagcagtgcctgctaaagggagagggcacattaaaatacaggaagccagaacagagatgggacaatctcatgaccacttaccagactccagctcttagatccatcaacttcccaattaacagccaagctcccaagctggggagcgcatccaagtcctgactaagccacatggctgctcctaagctttgcccactgcactgctcccagctgaggctcaccaacctcaccatccactgagctgtcaatcttcccactgctttgtgattggtggcacagagaccttctcttttcttcttctgcctcattgtgtgtttttccaaatatttctcaatcttacaatcagattctggttgtgaacgtcatttcctgttcttggttttgggtcacatgggtgctgttggtgaaaagctcaagactagaaagaggggatgctgggaataccacctgtccaatcatcacaagttcttggccttccatgccactgtggatgttaaggaaaggagaggtgacattgtacgactggtgagttcttctctctgctaccagactccagggaaccatcaataggcacaatttttaatgcctattgatgtttaaaatctgccgtaattggatgagatctgccaagatgaacaagaagggctacacttggtccataattttcgtagaataaatttgtgaaaattgacctagaca

SEQ ID NO: 155 - DNA, 981 bp, Mus Mus; identical to SEQ ID NO: 134

SEQ ID NO: 156 - DNA, 2295 bp, Mus Mus
accagcacccacagaaggggacagattgaggagctagttgccaggcctggtgaccacacacagagtatcctgccgcctgcgtcctcatgattagtgacaagagccccccgaggctgagcaggcccagttatggctccatttccagcctgcctggcccagcacctcagccagcgccttgccgggagacctacctgagtgagaagatccccattcccagcgcagaccagggtacattcagcctgaggaagctgtgggcgttcacggggcctggtttcctcatgagcatcgctttccttgacccgggaaacattgagtccgaccttcaagctggcgctgtggctgggttcaaactcctctgggtgctgctctgggcgactgtgctaggtttgctgtgccagcggctggctgcccggctgggcgtggtgacaggcaaggacttgggtgaagtctgccatctctactaccccaaggtgccccgcatcctcctctggctgaccattgagctggccattgtgggctcagatatgcaggaagtcatcgggacggctatctccttcaatctgctctccgctggacgcatcccgctgtggggcggtgtactgatcaccattgtggacaccttcttcttcctcttcttggataactatggtttgcgcaagctggaagctttcttcggtctcctcattaccataatggctttgaccttcggctatgagtatgtggtagcacacccttcccagggagcgctccttaagggcctggtgctgcccacctgtccgggctgtgggcagcccgagctgctgcaggcagtgggcatcgtcggtgccatcatcatgccccataacatctacctgcactcagccttggtcaagtctagagaagtagacagaacccgccgggtggatgttcgagaagccaacatgtacttcctgattgaggccaccatcgccctatcggtgtccttcatcatcaacctcttcgtcatggctgtttttggtcaggccttctaccagcaaaccaatgaggaagcgttcaacatctgtgccaacagcagcctccagaactatgctaagatcttccccagggacaataacactgtgtcagtggatatttatcaaggaggtgtgatcctaggctgtctctttggccctgcggccctctacatctgggcagtaggtctcctggcagcggggcagagttctactatgaccggcacctatgcaggacagttcgtgatggagggtttccttaagctgcggtggtcccgcttcgctcgggtccttctcacgcgctcttgcgccatcctgcccactgtgttggtggctgtcttccgagacctgaaggacctgtccggcctcaacgatctactcaatgttctgcagagtctactgctgcccttcgctgtactgcccattttgactttcaccagcatgccagctgtcatgcaggagtttgccaacggccggatgagcaaagccatcacttcgtgcatcatggcgctagtctgcgccatcaacctgtactttgtgatcagctacctgcccagcctcccgcaccctgcctactttggccttgtggctctgttcgcaataggttacttgggcctgactgcttatctggcctggacctgttgcatcgcccacggagccaccttcctgacccacagctcccacaagcacttcttatatgggctccctaacgaggagcagggaggcgtgcagggttccgggtgaccgcggcatccagcaagcaaagaggcaacagggcagacacagcagagcaattggaggtcccctactggctttctggattaccggtttccagtttggacaagtgctttacctcggaataatgacaccattcttatcaccacaacctaagagacttaaaaaacacagtgcctggggcgagagatggctcaggtgtgagaacactagccaccaccctttcagaagatggggattcaattcccagcatcaacgtggtggctttcaactgaaggtgactccagttcccagaacacctcaaacagaactgccacaactccattgtctcactccagctcgtggaagatgaagggaggagtcctaaagagttctaggtcgggtctctggagagacggctcagctgttaagagcaccggactgctcttccagaggtcctgagttcaattcccagcaaccacatggtggctcacaaccatccataatgggatccctcttctggtgtgtctgaagacaacaacagtgtcctcacatatataaaataaataaatcttaaaaaaaaaaaaaaaaa

SEQ ID NO: 157 - DNA, 7431 bp, Mus Mus
cgactggagcacgaggacactgacatggactgaaggagtagaaaattccaatcctgggatagcgaggtgaagatagaaactaaggactggggagggatttccaggaaatgaaagctgaaagaagttatctcaatgttaaaactctgagcagttttggacgacccagcagtcgccgcttcctagttcagtcaggatggcagcgtcgggttccttcccgctgctggtcgagggctcttggggccccgaccccccaaagaacttgatcaacaagttgcaagtgtacttccagagccggaagaaatccggaggaggggagtgcgaggtcgtcccggagccggggaacccagcacgcttccgggtgctcttctccccggaggatgttcggcagaacgttctggagagagggaatcatgagttagtgtggcaagaaaaaggaacattcaagttgactgtcctgatgcccacagaccctgaggaagcctctgcctctaagaagtcaaggaaggagtctccagaagaggagtccaagacaaaagaagatgctgtgaaacaaggtgatttggatataacacattctcccagcagtggatcagaaaagacagaagatgtcccaaaagaatgtgaaaatatttcctccatggtggcatttgaaaacctgcctgagaaagtatccgagatggtgctgaccatcctggtggagaatataagcggcctccccagtgatgactttaaggtggaagtgaaccgagattttgctgttgccgtggttacctttcagaagcctatagatatcaaaaaatttattgttgactgtatcagccaccgctcaaatcaacaactccagcttgccccgagacttctggaaacaacgaatgtagtcagggtggaaaacctgcctcctggggtggacgagtaccagctgcaactcttcttcgaaaaccctttcaatgggggcggaagggtcgcccgagttgagtgtttcccagaagagagttcggcactggttgagttttgtgacagcaaagtgttagacaccgtcatggccaagacacacagttacaacaagatgccactgtctgtcttcccctattatccctctctgggcacagccttgtatggtgaggagaagcctctgataaagcttccagcatctttccaggagtctcttgatcttcctttgtggaagttctttcagaaaaataatcatctgattgaggagataaataatgaaatgaggtgctgtcactgtgagctgacttggtctgaaatcaatggtaaactgaccatcagacccgctgccaccttagtcaatcatagactgagcattaagacctggcagagagacgcatccgcagtgctctctggcatcaagtctaaatatggagtggagttgtttgaagtgtgctcgccagtatgggacatcataaagcatgagttagagtcaggagatgacagggttttggttgagtttgaaaaggagagtctaaacatagcaggaaaatcagaagacgtccaaggcatgagccagaaaatcagggaattaatagagagcaccactgaaaagctcagaagggaagagcagagtctgaaggagaaagtggccatttccccgggaaagcattatcttttgcaccacagtggcttcctgaaggatctaagcaaggggttcccagagatggagatctcttacgacgccacggctcagttcctgtacttgaagggcttccgtgcagatgtgtacaaagtaaagtgtgacatccaagagaaggtgttctccatggctcaaaaggatgtccaggtctcttctgaagtcttcgaatttctgcagcaagtagacagtcagagactctctaagtctctgtttgaggcacagaacattctcgccatatatgagctgaaaggtacagctcttttcttagttggaagttctttcaaagatctggcagaagccgagacaaaaatgctcagtgctttaagtcataagcagattgaagttgaggacaaggaggttctgataagtaatgggtggaagaagaaagttcaccctctgcaaaagagacacagctcttgtgcaaccattatagtccagaatgaattgacttcagaaaccccggcaaaggtcattgttacaggctgtgtgaaagaagtgaatgaaatccataggcaactttttgagtatttggaaaacaacatgaaagttgaaagagcacttaaaatcaaaccatccttgattgttgactatttaaggacagacaagaggctattgtcaaagataaagaaggcacatgtgtatgtgcattttaagcctaaagactatccaaacagcattttgctaactggctgcaagagcaaagttctagagtgcatgaatctagtcaaggaaatccaggattcagtctgtgtccaaagattccagactgacaaagctggcgtcaggcacttcttcaaagataaagaatcgtattacaaaacggagattggtcgtcagttcggatgcgtcattgaactggaggaggatagagaggagaagggtgaagaggaggatggtgaagaggaggagggtgaggaggagggagaaagcagcattaatgagcagaagtgtcacctacagagggacatagcccccggagtcaaactgttcgtcctcgaggaagacctgagtcggtttcccgtcgatgtggtagtgaatgcagcaaatgagaacctgaagcatatcagcggtctcgcacaggctctctcaaaggccgctggccctgaactccaaacagaatgtgaccagatagtaaaagagggcggcgtggtcctacccggcaatgctgttatctcaaaagcaggcaagctcccttgtcaccacgtcatccatgcggtagggcctcgatggaagggagataaagtcctggagtgtgtgagcctgctaaagaaagtggttagacaaagcctcagtttagctgaggagcacaggtgccgctccatagccatgccagcggtcagcgctgggatctttgactttcccttagaactgtgtgtggcaaacattgtttcagccatcaaggaacacttccagcataagcgagacacacacaccttgaaaaagatttacctggtgggcctacctgccaaggttgccagggcctttgctgaagctgtcaagactacatataaagactccctttcccacacagctttcccatccagtttaaaggctttagtaccacttgggaaaacgccccagaaacagggcagtctgctggtgtcaccagaaggcctgagaatccgcctggtagaagaaggcgtgcagaatgctacgacccatgccattgtgaacactatttccccggatcttaaactcaacaaaggacccctttctcaggccttcttggaaaaggctgggccaaaactccaggaggaattgaccaggtcaggacaaggggtctctgttgatgtgggcacaattcttcaaaccagtggctgtaatctcaacagccgccacgtcttccatgtggtgcctccaccttggaaaagcaacaacagtgcatggtcactaaagatcatgaaaaacatcatccgtgactgcctgaagaccaccgagaacctgtctctacaatcgattgcatttccagcaataggaacgggaaatttgaggtttcctaaacctgaatttgctaaattaataatttcagaagtgctcaaatttagtagcaggaaccaactgaaaactttacaagaggttcagtttctgctgcacccgaaagaccatgaaaacattcaggcattttcagatgaatttgacaagagaaataatggagatcctagtgacaaaaatcccaaggctgaagacacacaaggtatctatgggagcctttccagccctactttaggaatgcatgaaatgaatattggtccaatcctcttccaagtggccactgggaacatcatcaaagaagtggcagatgtgattgtcaattcaacaacactcacatttgatctcaaatcaggggtctccaaagcaattttggaaggtgcaggacaaaatgtggagcaagaatgttctctcttggctaaacagagtaaccatgggtatatagtcactggaggtggactattgcaatgtaagaacattattcatgttgttggtgggaatgatgtcaagaaatcggtttcctgtgttttggaagaatgtgaacaacggaattactcatccatttgcctaccagctattggcacaggaaatgctcaacaggacccaaacgtagtagcaaaagcgataatagatgccattgaagaatttgtccagaaaaaatcagtgcaggctgtgaagagagttaaagttgttatcttccagccccatattctgcaatttttttacgacaacatgaaagaaagagaaggctctccagctccccccaagcagtcgcctgccaagcagtcagtgatgtctaagattgcctcctttcttggctttcccaagcaagcttcccccaaaaagaacaccctggttttggaaaagaaaatagagcacacagttttccaggtatgtggttcaggggtagacagtgtgaacaaaacaatctcctggctaaaggaactgattaccaaagagcagctttcctacaccaatgacgatgagtgtgtcagtgactttgacatggaggagtacgagaaactgaatgagattcagaaggaactgaacatcaccattgagatgaaccagaagaaaacttcgattcaagtttcaggaattagcagagacgtgataaaagctagagatgagattgagggcatgatcaagagcattcgattggctaaagaaaaggaaagccaggcagactacatctctacatatgtggaatggcagtatattgataaaaacatcacacagtgttttgacaaaatgaccaacatgaagttggaggttgcatggaaggccaagaagaaggacacggttgtccaaattcacaatcaggatttcacggtggacttgagcacaaacacagccaccgctccccaaggccagactttgactgttcagcgcctcgtcaaagctgaagctgaaatccctgccaattggagtgacatgaagcaggacaaattgcttctggtgaatctgcaaaccagtgatcccgaatacaacatggtggcaagcgccttccgtcagacctgctcaaactttttcatagagaagattgaaaggattcagaatccagctctttggagaaggtatcaggcatacaaaaaaagtatggatgaaaagaatggcaatgtaagaaatgagaagcatctcttccatgggacagaggctagctctctaccacagctcaacagtaatggatttaaccgcagctatgctgggaagaacgctactgcctacgggaaaggaacctattttgctgtcaaagcttcctattctgcctgtgacacatattccagaccagacaccaatgggagaaagtatatgtattatgtgcgggttctcactggaaactacacgaatggaaacgcgtcactgattgtgcccccctcgagggaccctcaaaatgctgctgacttgtatgacaccgtcacagataatgataaaaatccaagtatatttgtagtgttttatgacaaccaaacgtaccctgagtatcttatcacatttaggcagtaacacttcgaaagacatcggtgttcatgaatctgctgtaagacaagttttagctgttttccttcttaagctttctctaagagcacaaggtctttctttgccgtgggtgtgtttcctccacagtgaaaatgaatctacttgagagccaatcgcttgagaatttaaaacaggtaacagctgtaacttcgttcacctcgaatatgtggaaatatgaacctcgaatctgtggaaaagaacagacttttttgttcaggaaggacaccttcagaaagccccacaatcccagctaccaccagtggaatcatgtcagtgcgccactgtgctgtgggacacagcaccactgagccaatggggctgctgtcttccttgctgccaactgaacagattccgggacagagaacgtcgctcttcgctaacagagctgtgttgcgtgggttggacagctccagccagggttatgtacaaactgggtgctggcatgtggcccttggtctgtgtgaactgagcccccaaggagaggcacagctcaatccctggccccaactgccagtgggcccttctaatgttgacaccgatgttcaggctacctagggaatggatgggacggtgcccgctacctctccagtggaaacccttcttctaactgtgtgaaagcgagtgaactctaagggtatcggctaacatctttcctgtggcaggccagcttgtgataacttgaaagctttacgtataagtcagtcatttttctaacttactaacagtatctactggatgtgaattatttcttgtggcgccagagattatcctggaccccacacgagccaggcaaacgcaatggaactatattcccagccctcttcttgtttgaaggcaggatcccactaaattgctctggcaggccttgaactcattatcttcctgttttgtctacctactgggggtggggggtgggctctgtactttttaatttcctcctgtacatttcagactcgacgccatttattgagtgcctggacctttttcaggtagaataagaggtatgttcacatacatgattttgtccccatcaacagtgaattgtaagaattattccattatttcaaggcttaggaacgtgctcagagtacaagaaatgtctttgcctgaggtcaccgaggcaggaactgcagaggcagccaggctaagtctggctcaactgagttacccaccacagagcatggccttgagataagtgtgtgctgcttcagaagttatctcagatggtgtgtgaggcaaacccagatttccttggcttttctcctttctggcattggtgtccactctacctcttattaggcattttctaggccctggagctagtgctgtgtagtagcttgggtgatgggggaggatttatgttcccaccataggcatcaaccagtgggcttcaagcagagagagggatccacattgctgtcctatcgacaccgaagccttgagaccttggctgctgtgtctaagtggactggcagagactgtggcttgggaggtggcctccccagcactggcactaaggatgaccttacgaagatggatgaagagatggaatgaaaggaagaggcttgtttccatttgcttctgttctccagtgatttggttaactcagggcaaggctgaataacactgggatgttacattgaagaatgactagccaaccaatgttacagacactttcattcaaagtaaatatgtcattgtcttcacttcctagtaaagttacataattacataaaaaaaaaaaaaaaaaa

SEQ ID NO: 158 - DNA, 2427 bp, Mus Mus
agtttcatttctagagctccagaaacctccgcagagaccagcctagtctgctgctattcatttccaaaccccatcctaatcctggccagtgcaggctccagaatggagctgcgaccctaccagtgggaagtgatcttacctgctctggagggcaagaatatcattatatggctgcccacgggtgctgggaagacccgggcagctgcctttgtagccaagaggcatctagagacggtagacagaggcaaggtggtggtactggtcaatagggtacacctggtgagccagcacgccgaggagttcaggcgcatgctggataaacactggactgtaacaaccctgagtggggacatgggatcccgagctggctttggcctgatggctcggagccacgacctgctcatctgtacggcagagttgttacagttggcactcaacagctctgaggaggatgaacacgtagagctcagagaattctcgctgattgtggtggacgagtgtcaccacacccacaaggacaccgtctacaacaccatcttgagccggtacctagaacagaagctgaagaaggcagagcccctcccccaggtcctgggtctcacagcctccccaggcactggaggggccaccaagctccaaggggccattgatcacatcctacagctttgtgcgaatttggatacgtgccacatcatgtcgccaaagaattgctactcccagctgctgatgcataacccaaagccctgcaagcagtatgacctctgccaaaggcgcgcacaggatccttttggggacttgataaaaaagcttatgaaccaaatccaccaacaactagagatgcctgacttgaagcaacaatttggaacccagatgtatgagcagcaagtggtacagttgtgcaaggatgcggcagaggctggactccaggaacagcgggtgtatgcgctgcatttgcggcgctacaatgatgcgctatttatccacgatactgtccgtgcccgggacgcccttgacatgttgcaagatttttacgacagagaacgcaccacaaaaacacagatggtgcgtgctgaaagctggctgctgaagctgtttgatgaccataaaaatgtgctgggccagctagcagctcggggtcctgagaacccgaagttggagatgctggaaaggatcttactgaagcagtttgggagtcctggccacactcggggtatcatcttcaccagaacccgtcagactgcttcctccctcctgctctggcttcggcagcagccttgcctacagactgtgggcatcaagccgcagatgctgatcggagcagggaacacaagccagagcacacacatgacccagaaagaccagcaggaagtgatccaggagttcagggatggtatcctgagccttctagtggccacaagtgtggcagaggaggggctggatatcgctcagtgcaatgtggtggtgcgctatgggctcctgaccaatgagatctccatggtccaggcccggggtcgtgctcgagctggtcagagtgtgtactccttcctggctacagagggcagtcgggagatgaagcgggagctaaccaatgaggctctggaggtgctgatggagaaggctgtggctgctgtacagaagatggaccctgatgagttcaaggccaagatccgggacttgcagcaagcatctctagttaagcgggcagcacgcgcggcccatcgggagatccagcaggggcagttcctaccggagcacgtgcaacttctctgcatcaactgtatggtggccgtgggctacgggagtgacctgcggaaagtggagggcacccaccacgtcaatgtgaaccccaacttctcggtctactataccacctcccagaaccctgtggtcattaacaaggtctttaaggactggagacctggaggaaccatcaggtgcagtaactgtggggaggtctggggcttccagatgatctacaaatcagtgaccttgccagtgctcaaaatcggaagcatactactggaaacacctcgagggaagatccaggccaaaaagtggtcccgggtgcctttctccataccagtcttcgatatcctgcaggactgcacacaaagcctgtctgagctctccctggactgacccccttgtgactgcagtacctaggtcaaactgcagggggcaggagagtccagcaagccatcctccttcccctggctagcactctggtcagggtacccctttattctgctgcagagatcttaaacacattggatggagttggaagatgaacgcaggagaattattatgccatgatgttctaagaactacaacatccctcccttgcccaagcaccttgtaggttttgtttttgtttttgaggctcttcataaattaaaggtgtagtagagaataaaaaaaaaaaaaaaa

SEQ ID NO: 159 - DNA, 1722 bp, Mus Mus
gtatgattatacccttgtgtggggtggggggtggtacagaagggaccctcatcctgaacaagcccagaggttactggaatattcctgcctcccagaaatttgtccagggtcttggaacactgtcccaaactggctctgaggccctaccaagcttagtgcttcccatgctctagcctttagactttctactgtcccagtgggagtcagagacctctgctaagtgctggtagtaggggggaaaggtgactttgtcttgcctgggataggacatggagaaggaacaccccctcccctgcctccagcctcgcttgcctctatttccctcttgccctgccactgtccactgcaaagcttggagtggaaccggatcacagcacgtggagcccaactcctggctcaagggctggtccagggatcctgcgtcccagtcattcgcctctggaacaaccccattcttaacgatgtggcccagagtctgcagagccaggaacccaggctggacttctccatcactgaccagcagactctttgaggaacccaacggacttctcaagacttatgagtccagtccagtgacagccacatcacccaccaggagagggggctcagaagaacctctgttggtgcccagcatcctacgaatgccccaggaggaaagaacacatttttcctgtcacgatccctagggagcgcattcttagggactgagagctttgtttgaccaaaagagggccatatatcatatatcatacatgacatatgttaccaatggggcattgacattatgagagtattatgaggttatatatacaggaaaggctgtgtatggtgcactatgaccccttgacatgggaaggtcatactcagagtaggtcaaatgtagaattacatggaacttgtggcatgacacctggtcatagcctcttagcactgtaattggaaatacacatgatcaggaatccacttatgacatgatgtccatatcacatgacacacaacttgacaggggaccacagataagtccaagacctaatttattattattttaaaaaacatgaagttaggctaatggtataggctatgttatatgaacagccttttagctgttcaggaatctgaggcagacagatcgcaagttcaaggtcaatctaggtaatttagtaagatcctgtctcaaaaggtcagaaagggctggggatatggctcaatgctagagtgcttcctagcatgtgtaaagccctaagctcaatgctcggtgcttttttttttttttaagtatttataagcaccttctggagaaactttttgtcttgtgctaggagagggagttaagaattgagtggcccaatggtccggggtctgggacatgccaaggacttagcatgaagtcccctcctgccagagcctcaagtctctcttctgttaatcgtgttcttccaaggacttccagcccaggcttaggagttaacctgaccttgggagagttcgcactcatctcttctttcctggtttaagggacaaagccgagctacaggtttagggataagtacttccaggataataggcaagaccactaggtctagcctacacactacctcagcaggattcagaaaccacttgaaactccatggtgttttgctttgttttgcaacttccaaaggctaaactcacaacactccatatcaaatgatcaataaacgcagatgtaactggtgtctgatg

SEQ ID NO: 160 - DNA, 2698 bp, Mus Mus
gggggccaggtcgtgcgcggagcgggggtggcggcgcaggagtggcgaaggcgacggctcggcagggcctgcccgacgaggctcagggccgagctggtagggtaccttgctagccctgaaggcgagtgtggcggcctagggctgaacgccgagagagggctccttggcgggaagctgaggcccagacaggaggaatggcgagtggtgggctcgctgtcgggtaccgtcgctgagagttggctgggaaaaccagggggaatttgaacccccatggccaccgatgacagcatcattgtacttgatgatgacgatgaagatgaagctgctgctcaaccagggccctccaacctaccccccaatcctgcctcaacaggacctggtcctggcctgtctcaacaggccactggtctctccgagccccgtgtggatggagggagcagtaactccggtagtaggaagtgctacaagttggataatgagaagctctttgaagagttccttgaactgtgtaagacggagacatcagaccaccctgaggtggttccgttcctccacaaactgcagcagcgtgcccagtctgtgtttctggcctctgcagagttctgcaacatcctctccagggttctggctcggtctcggaagcggcccgctaagatctatgtgtacattaacgagctctgcactgttcttaaagctcactccatcaagaagaagttgaacttagctcctgcagcctcaacgaccagtgaggcgtcgggccctaaccctcccacagagcccccctctgaccttacaaacactgaaaacactgcctctgaggcctcaaggactcgcggttcccggaggcagatccagcgcctggagcagctgctggcactgtacgtagccgagattcggcggctgcaggagaaggagttggacctgtcagagctggatgacccagactcctcgtatttgcaggaggcccgcttgaagaggaagttgatccgcctcttcgggcggttgtgtgagttgaaggactgctcttctctgacggggcgggtcatagagcagcgaattccgtaccgaggcacccggtacccagaggtcaacaggcgcattgaacggctcattaacaagccggggctggacaccttccccgattatggagatgtgctgagagccgtggagaaggcggcgacccggcacagcctgggccttcccagacagcagcttcagctcctggctcaggatgccttccgggacgtgggcgtcaggttacaggagcggcgccacctggatctcatctacaactttggctgtcacctcacagatgactataggccaggcgttgaccccgcactgtctgatcccacattggctcgccgccttcgggaaaatcgaaccttggccatgaaccggctggatgaggtcatctccaagtatgcaatgatgcaagacaagactgaggagggcgagagacagaagagacgagcccggctcttaggcaccgccccccaaccttcagacccccccaaagcctcctcggaatctggtgagggtcctagcggaatggcatcccaggagtgccctactacctccaaagctgagactgatgatgacgatgatgacgatgatgatgacgacgacgaagataacgaggaaagtgaggaggaggaggaggaggaagaggaggagaaagaggctactgaagatgaagatgaggatctagaacagttgcaggaagatcaggggggtgatgaagaagaggaaggaggagataatgaaggaaatgagagtcccacatcgccttcagactttttccatagaaggaattcagagcctgcagaagggctcaggacccccgaggggcagcaaaagagaggactgacagagaccccagcatccccgccaggggcatccctggaccctcccagcactgacgctgagagcagtggagagcagctcctcgagccgctcctgggagacgagagtcctgtgtcccagctcgctgagctagagatggaagctttgcctgaggaaagggacatttcctcctccaggaaaaagtcggaagattccctccccaccatcttggaaaatggggcagctgtggttacctctacatctgtcaatgggcgtgtctcttctcacacttggagagatgccagtccccccagcaagagatttcggaaggaaaagaagcaactgggctctggactgttaggaaacagctatataaaagaaccgatggcacagcaggacagtgggcagaacacaagtgtccagcctatgccatccccccccttggcctctgtggcttctgtcgctgattcctccacaagggtggactctcccagccatgaactggtgaccagctctctgtgcagcccttctccatccctgcttctccagacaccccaggctcagtctctccggcagtgtatttataagaccagtgtggccacacagtgcgacccggaggagatcatcgtgctttcagactctgattagcaggccccatgctccccgtgctccctgcatccagaaggttttttgtatggctgttggaagatgatggagtaaaagatggacagagctcctcccgttttgatggtgtttcttttgacaaaaaaaaaaaatcaaaatgttttaagttttacacagacacattaataaacaatgaatttctttttattgtaaaaaaaaaaaaaaaaaa

SEQ ID NO: 161 - DNA, 945 bp, Mus Mus
tccttgcagcgcgggtttcagtgatgctgcgcttaggatggatgcggctgttgcccgtgctctgcagcctcctgctggggcgagccgaggccccgagccccgggttgccgccggagcagagccggtcctacgaggtgctgcggaggcagagcctggatttatcgaattatctgaaggggaactggtcgcaggagctggacaggttgcacaaggagctgcaaatacagatccagaagcttaatcgaaccagagtggaaccagtgacccttggaggctttacctcttggcttacctctgcattttcttactttaaggaatgggtgggagtgattttgtttggtgctgctatatgctgtggactggtattcgtgcttcagttggtttacaaattcagaacccaacaaaaacgtgacaaggtgattataactcaagcacttccctgaagtttggttatctatgctcaagaattagtcggcatcttgaaagagtaaaacttaaaaacaaaattctaggcctttaggcccaggtttgggaatgtggcctttgtgataataaaacagataacgacattcctccacccacctgctttctgggttcaaagagtgttcattcaaagaaagtcaccctgacccaccctgaccattgctggaacccgctattcaaaggtgctattgttaggggctcttagaaactgtcttgagaaataaccctcacaattaccaggtattcctcttgactcttgtgactttgcacttccttgtgactcttaactggtatttttggtattttccaacaacccccttcccacctccttgagttgtggtttcttcctttaaatacccccttatccagctactcggcgcgccacggtcctctactcctgtgtggtgtatgaccgtgggcctgagagcgctcttgaataaaaatcctcttgcagtttgcagc

SEQ ID NO: 162 - DNA, 1381 bp, Mus Mus
gcgagatttcgtccttgtcctagtccggctgctgggcgccgggagcgctcttttcgacgcggcggaagagaaaattgggaaaggccgcgaaaagtgatggctcaatcagaagtgaattctgtctgtgtggcatcggatagagctggagatactggagaccaaagtgatgactcctctgatggcagcttatttaaaactcagtgtgctccttcacctatacaaaagcaaagacaccctactgtgaaacgtgttactttacctgcaagtgttgaaacagattcatcaagtgactcttctatagaaccaaggcctctgactttaaaggctatttttgaaagatttaaaaaaaagaaacggaaaaagaggaaaaagagaaaatatgagccaaaattaagaccaagaggaagaccaagaggaaaaccatcgggaacgaggatcactagaaggtcgcaaatagatgcaaaacaaattaaagacaaaggagctgtgtttccattcttagaatctgagagtggaagaaaacctttaccttggaagaaaattttaacatatgagcaagctgttgcaagaggattttttcaccacattgaaaaactcaagtatgaacaccaccttaaggaatgcttgaagcaaatgcatgctggggaagatttagaaaaggaagaccttgacagtcggaggcacaaatacatggatgatgatggttcactttctcctattgaagagccattaactgaagatgaagcaacaaatcctcaggctgaatgtgatatcaagttggttgaagacagttgcttcataataagttcagaattctcaaggaagagaaacttggaacaagagaagattaagaaagaatctacattttctaaaaaagccaaagatgccacacacagagagaaagggcacagaagaaccttgaaaggaaatgaacatgtgactattgaagaaggtaaagaacatagataacagtgtatgccaagtagatcaagaactaatctggggaagaagataaacttgctggtggaacgctaataaatacttagtaaagcttttttcgttgcttgatttcagagtaagaaatactataaggattattttactactatagtaaacatgattgtgattctggaaggaaaatgctaacaatcctatacatgtctagattcaagaccccagcctcgcccttttgctcatctgcagagcaaggtcatgaagaaaggagagttagagtatctggaggttcaccacctctgtggtctgtcgcagccactatgactatgaggaggaagagatgatttgaaaattggattaaactcctggactcttatactagaaaaaataaactaatgataaaacccaaaaaaaaaaaaaaaaaaaa

SEQ ID NO: 163 - DNA, 2427 bp, Mus Mus; identical to SEQ ID NO: 158

SEQ ID NO: 164 - DNA, 1425 bp, Mus Mus
gaatctaatcagggctaccacgggaaggatggggtcctcaagcaaccgcgctctcctgcacatggtggtggtctctttggctgttacccaaacaggttctggctcacattcactgcgctatttccacactgcggtgtcacggccgggccgtggggagccccagtatatctctgtgggctatgttgacgacgtgcagtttcagcgctgtgatagcattgaggaaattccgaggatggaacctcgtgcaccttggatggagaaggaaagaccagagtactggaaggagctgaaactcaaggtcaagaatattgcacaaagtgccagagcaaaccttcggaccctgctccgctactacaaccagagtgaaggcggctctcacatcctgcagtggatggtttcctgtgaggtagggccagacatgcgccttcttggagcccactatcaggctgcgtatgatggctcagattacatcaccctgaatgaagacctgagctcctggactgcagtggacatggtgtctcagatcacgaagagccgtttagagtcagctggcacagcagagtacttcagggcctatgtggagggagagtgcctggagctgctccacagattcctgcggaatggcaaggagattcttcagcgagcagatcccccaaaggcacatgtggcccatcacccgagacccaaaggtgatgttaccttgaggtgctgggctctgggcttctaccctgctgacatcaccctgacctggcagaaggatgaagaggacctgacccaggacatggagcttgtggaaacgaggccttcaggggatggaaccttccagaagtgggcagctgtggtggtgccttctggagaggagcagagatacacatgttatgtgcaccatgaggggctaaccgagccccttgccctgaaatggggaagatcgtctcaatcatctgtcgtcatcatggtcatcgttgctagtctggttctcctgggaggtgtgatcactattgttgtggtgtgcaagaggaggggtgcaggggaaagatgaatcagttatactcagactgccagcaggaacagtgattaagttctgatgcttctttcaccatttagaaagttggcatctcatggtgtgtctcctgtcagcacagtgtgacaaagtgagcagcccagggcatccctgaggactgagtctcctctccatacctgtgtctcctccttttctcacctgtaccacagggggatccaggacttcttcatcccttgtggaactttaggtttctatgggcagcttcttccctattgaaaaataaggatgtagatatagctttattattattatttttttttttaccttctcgataaaagctgtacttcatgctgttaaaagtgtaagatttgtacattggaaaggaaataaaacatgaaaactca

SEQ ID NO: 165 - DNA, 2843 bp, Mus Mus
cttgcgctgtcactcagcccaatgctctcagcgtgggggtagaagaagcaccaccgcccgttccaccggccgcccagtcggccacttgtcctcggctcttccgccactgcctcaatgggttctgctctgctcctcgccctcgggctgcttgcccagagccttggcctgtcctgggcagtccctgagcccaaacccagcaccctgtacccctggcgccgggcatcagccccaggccgtgtgcggagagcctgggtcatcccacccattagtgtgtctgagaaccacaaacgcctcccctacccacttgtgcagatcaagtctgacaaacagcagctaggcagtgtcatctacagcatccagggtcccggagtggatgaggagccccgaaatgtcttctccatcgacaagttcaccgggagggtgtacctcaatgccacgctggaccgcgagaagacggaccgcttcaggctaagggcctttgccttggacttgggtggctctaccctggaggaccccacggacctggagatcgttgtggtggatcaaaatgacaaccggccagccttcctacaggatgtgttcagaggccgcatcctggagggtgccatcccaggcaccttcgtcaccagggctgaggccacagatgccgacgacccagagacagacaatgcagccctcaggttctccatcctggagcagggcagccctgagttcttcagcatcgacgagcacacgggagagatccgcacggtgcaagtggggctggaccgtgaggtggtggctgtgtataatctgaccttgcaagtggcagacatgtcgggagacggactcactgccacagcctcggccatcatctccatagatgacatcaacgacaatgcccccgagttcaccaaggatgagttctttatggaggctgcagaggctgtcagtggagtggacgtgggacggctcgaggtggaagacaaggacctgcctggttcccccaactgggtggccaggttcaccatccttgaaggtgatcctgatgggcagttcaagatctacacagaccctaagaccaatgaaggtgtgctgtccgtggtcaagcccctggactatgagagccgtgagcagtatgagctcagagtgtctgtacaaaacgaggccccgctgcaggcagctgcccctcgggctcggcggggccagaccagggtcagcgtgtgggttcaggacaccaacgaagctccagtgtttccagagaacccactgaggacgagcatagctgaaggagcccccccaggcacctctgtggccaccttctctgccagagaccctgacacagaacagctgcagagaatcagctactccaaagactacgacccagaagactggctgcaagtggacggggccacaggcaggatccagacccagcgagtgctgagccctgcttcaccctttttgaaggacggctggtacagagccatcatcctagccctggacaatgccattcctcctagcacagccacaggcaccctgtccatcgagatcctagaagtcaacgaccatgcccctgcactggctcttcctccatctggcagcctgtgcagtgaaccagaccagggccctggcctcctcttgggtgccacggatgaggacctgcccccacacggggcccctttccacttccagctgaaccccagagtaccagatctgggccggaactggagcgtcagccagattaacgtgagccatgcacgcttgcggctccgacatcaggtctccgagggcctgcatcgcctgagcctgctactccaggactctggggagccaccccagcagcgagagcaaacgctgaacgtcaccgtgtgtcgctgtgggtcggatggcacttgcctgcccggggctgccgcgcttcgaggaggaggtgtaggcgtcagcttgggggcactggtcattgtgctggccagcaccgtggtcttactagttctcatcctgcttgccgcgctccgcacacggttccgggggcattcccggggcaagagtctgttgcatggcctacaagaggaccttcgggacaacatccttaactatgatgagcaaggaggcggggaggaggaccaggatgcgtacgacataaaccagctgcgccacccagtggagccgagggccacaagtcgctctttgggcaggccacccctgcgcagggatgcccccttcagctatgtgccacagccacatcgagtgcttcccaccagcccatctgacattgccaacttcatcagtgatggcttggaggctgcggacagcgaccccagcgtgcctccctacgacacagctctcatctatgactacgagggagatggctctgtggcagggacgctgagctccattctgtccagcctgggagatgaagaccaggactatgactacctccgggactggggaccccgctttgctcggctggcggacatgtatggacatcagtgagagccagggccaagggcagatgtgctgtgtggatacgcccacttggcccaactaaggggctctctcttgggatgtgcacccagaaatcctatgagggtcaacagcatggcccatccttggctccatggcagataaactcaaggaggtcatctctgtgaggtccaagagaggactgagtcaggagtggtgggagaatctggagcatggactaggcagctagagggagcactgtcctggcagagtgcagaagccacccttagtcgccctgctagggctcatcccatctttgattcccagttgtgactcttgcctctgtatgaaaagcaggcgtctaaagagtggatttcaattaaaagcatactatttggtggatc

SEQ ID NO: 166 - DNA, 7416 bp, Mus Mus
ggaaaaacttggcactctttttacggctggaaggagaaggaacaccaggaacggattagagagtcccaccaactcaaatagcaaatcggcctctgctaaagtcccaaaaacagggagtgagaaaactaaggctcaggacaaccaactaaaggcaaccgacgctggcgaggcgggccccaggcaggaggctgagggccagcccgttgagagctgtgttcaggcaaccccctgcgacgccgaacagtcaccttgctccagcatcaatgtaggggttgtgcagcagtgccacagcaatgattcagcccaattagaacctctacaggcagagggagagactttcccagatgccaccaccgctgccaaagagctgctgcattcctcaccagggaatcgctccaggcaggagagcgcagagacgcccgcccgcagtccgggggaggaagcgttgcctggcgctggcctccaaccagagacagcgagaggtgtgtcggggtcgccgccagaggagcacctcgtgggaggagtaggagaggcccccgacggagcccccggcgtgggtgccgaagcgggctctctgggggccccgggggacgcggttcctccaggtgagcctcccgcccaggacgcagagaccagccgcacagccgggtcggtcgaccgcgcgcatcccaccaaagtgctaacgttggacatctacttgagcaaaactgaggtggctcaggtggacgagccggcctcgattgctccggggacagacgactgcgaggattcggacgacatggaaaagaggtcaagcggccgccggtctggtcggcggaggaagtcgcagaaatccaccgactccccgggtgcggatgcggtggctcccgagagtgcggccaaggacgaggcggtgttcgacgacgaggtggcgccagacgctgcggctgagaactgcttggcggaaaggaaagtgaaatcggtacaagcggttcccgacggaggcgcagccccggtcgcctgcccggagccaaaggccagctcctgccccagagggcaaccccgaggggaaccggaccgcagcaagcccctgtcgcccaccaagcggaagggtcgcagccgtgtccccgaggcggtgcccagctcgcccggcagtggctcgcgcgctcccgccaaggagtccccacccaagagggcgcccgctgcggcggacagcggcgaggaggcgggccgcgtcgtcccgcgcgagctcaccgtcaaaagcagctcgttgctgcccgagatcaagccagagcacaagaggggtcctctgccccaccactttgatagccggggcgacgggggtcgcagcaggggaacaggagcgtccgacgccgacggcctgaagcccaggaaccagttcggtgtgggcaggtctactgtgaccaccaaagtgaccctccccgccagacccaaacatgtggaactaaatctgaaaactccgaagaatcctgacagtttgggaaatgagcacaactcatttagccagccagttcataaggggaacacagccaacaaaatctccttatttgaaaacaagcgggctaacagtagcccccgccaccccgacgtccgtaacacaaggaacaatcctccctctagtaagacatttgttgggagggcgaagctgaacttagccaaaaaggccaaagaaatggagcaacccgaaaagaaagctgtgtcaaccagccaccagaatggcctggtggtcaaagagccatctgcagaagggaaaggcacagcagtccctgtccccagagaagagattcgtccagccaccagaggaggggaaggagagtccaccaaggatcaggtcctccgccctgagcctgagcaaagtgataagctggatgtacaaacagacactgcctatccttcccacccagggcccactgctctggttcctgtgaaggactctgagctctcaggagagggccagccagaggctgctgacagcaaaggccccgtccttaacaacacaagtgatgttgcacaggacatcgctgccatttgtgatgccagagaggctcccccaaagccacaggatgcattttctgactcacagccagcttcagcggctgagtcagctagggagtcatctctcccgccttctgcacccatttctgtggacgctccccaagatggctgtgttcaagttcccatatgcagtgttccctgcactgctctagaagtgtcagaaaaccacaatgggtgtgtttcgccagtctctcctcacactgagaaaactcccatctccaaacctggagtgggagaagccagtcccccttccactccagagcacagcccagaaactatggggaaagactgtccctccaaagtcctcgtccaggtccggtcctttgtgcttcccgtggagaatcctcaggatgtgagctctcaggtcatctcagagagctctgaagttagagaggcacagctgccaagctgtcacagtaatgagcctgaagtggtgtctgtcaccacttgtgttccgcagcacgaggatgcaccagacacatcacccaaggacatccatcacagagaaggacatgtggcacagtctcgaccacacatcacacagtcaggacctgagaaggctccgcccatccagagcagcagtgggatgccccagacagcggagttcatcctcacccactctcccagcagcagaagtcatgcagaaggcccccaaaggccaggtcaagatgcgaccagcccacttacccctaccaggcttttgaacatttctgctggtagtgacaatagtgtcttggattcttcttctgatatggaaaaattcactgaaattattaaaaagatggacagtgcagtatgtgtgccccagaaaaagaagaaggcccgggtcccaaactctccagcccctcacttcgctatgcctcccattcacgaggacagtttggaaaaggtgtttgatcccaacgtgttcaccattggtttagggaagaagaaggaaagcctggcagaggtgtcaccagctttgcacttgttgcagaaccacgaccccatatccaaactgagagccaagcgtgcatccaccgagcagagcatcgtcttcaagtccttgcacactaacagtaatgggaagagcgagccacagaccacttcagaagcaagtgacaaggagaacagggacatcaacagcggcggcgttaagaggtcacggctagaaaacagcacgcttttctcaagcatgctttcttctctgccacaagacaaagtcttttctccctccgtgacgtcagtcaacacaatgagcacatcttttagcacttctcagaacagctccgtatctcagtcatcagtggtacagcccaggaaggagggtggcctgccctgtggctcagacaaagaacagccacaccttgcaccccacaactccttaaaggtcttcaatttcaattcatcaaatacatctcgtctgggttccagccacatggaaaagtacccacaaaaagagggaagcaaggaagatgtgaattctcagggcaacctacaattgccagaaaacaacctttcagacttacccaaactgaagaacagcgatggcgtggaaggtattctgaagtcaaacctgccgaatgttgggagcgtggacgcggacttcctgggccttttcaaagcaagccggtatgacccaggccattccttttctggaatgtccttatcagactctatgactcttagaggaagtatgcacagcaaactcaacccccggcctggcaaggtagtgatattcagtgagcccgacgtctctgaggagtgcattgaggtgtttggggacatccaggactgcagctcctggcgcctctctccagtgatagtagtgaaagttgtccgaggatgttggattttgtatgagaaagccaattttgaagggcattctcttgctttagaagaaggtgaactggaactctctagtatctggggaacagaggaaatgttggatgaagaagcagagtctgataaacctgtagtgattggttccatcagacacgtggttcaggattacagaattagtcagatcgacttgtttactgagcctgaagggttaggactcctgaactcgtactttgatgacactgaggaaatgcagggcttccctgtgatgcagaagacgtgttccatcaaagtgcactggggcacatggctgatctatgaagagcctggattccaaggtgtccccttcattctggagcccggagaataccctgacctatccttctgggataccgaggaagcgtacatcggatccatgcggcctctgaaaatgggtggccgtaaagttgaattccctacagatccaaaggtagttatttatgaaaagccttcctttgaaggaaggtgtatggagctagaaacagaaatgagtagttttatcatggaaggaggtgagacagaagaaacaactggaaacaacaacttgccctttacatccgtggggtctatgaaagtcctaagaggcgtctgggttgcttatgagaagtgtggcttcactggccaccagtatttgctggaggagggagaatacagggactggaacgcctggggaggctacaatggagagctccagtctctgcggcctatattaagtgatttttcaaatgcgcacatgataatgtacagtgagaagaactttggctccaaaggttccagtattgatgtgttgggaattgttgccaatttgaaggagaccggctacggagtgaagacacagtcaatcaatgtactgagtggcgtgtgggtagcctatgaaaacccggacttcacgggggagcagtatgtcctggataaaggcttctacaccagttttgaggattggggaggcaaaaattgtaagatctcttccgtccaacccatatgcctggattctttcactggccccaggagacgaaatcagattcacttgttttcagaaccacagttccaaggtcaaagtcaaagttttgaagaaacaatagatcagattgacgactcctttcagaccaagtcttgcagagttttgggaggcagctgggttgcttatgatggagaaaatttctctggcaatcagtatgtactggaagaaggccactatccttgtctctcggcaatgggatgcctgcctggagcaaccctgaagtctcttcgctttatagattttgaattttccgaaccaacaattattcttttcgaaagagaaaacttcaaaggaaaaaagatagaactgaacgcagaaacagtcaatctccgatccttggggttcaacactcagatccgctctgtgcgggtcgttggtggcatatgggttacctatgaatatggcaattacagaggccggcagttcctgctgtctcctgcagaagtaccaaactggtatgagttcagtgcctgtcgccaaataggctccctccggccctttgctcagaaacgaatttacttcagacttcgaaacaaagcaacaggactatttatgtcaaccaacgggaacttggaagacctgaagcttctccgagtccaggtcatggaagatgttggtgctgatgatcagatctggatctatcaagaagggtgcatcaaatgcaggatagcagaagactgctgcctgacgatcgtgggcagcctcgtcacgtctggctccaaactaggactggccctcgatcaaaatgtcgacagtcagttctggtgcatgaagtccgacggcaggatctacagcaagatgaaaccaaatttagtgttggatgtgaaagggggtgcgcagtatgatcaaaatcacatcatcctcaacacagtgagcacagagaagttaacacaagtgtgggaagccatggtcctgtgaacctgaaccaagactgcaggaggagtatttccaggggattttctggccaccttattgaagaaaactaaaaattacagagctgctggaggagccaagtggaaagtttccgaaagccacggcagacagaatcatctcaaaaacatttgagtttgaagccaatagtttgttgttcttgttttttgccttgtattttctcagttccttcaacaggctgccctggtagcagctttagggtataagatgttttaaagatcaagacaagaccacatcacaatttttttccaggaataggaggggacaagacgtctgaatgtggacatacagattcccttagagagaaggataaaagcccaagttggttgttagaagactttagcattggagaacgtggtgccagacttctgatccatggccttaacacttccggggaccatttatgctggatggcagagtggcaaagtcctatatacttattccaaggagtttaataagtataaaccactattttcagttactattcaaatgaataaattttcaaaatttcatgttgatatctgctcatgaacagaacttgggttactttaattcacctacggactgccctcaagtgtctacagatacttcaatgccttccttacagctgctattgggacagtattatggcctaatttattaacccttactttactatccacacctaatgctgaagccatactctatacttttagctaaacaaagacctttcagcctggtttctctagggccacccgcaggatgactgcttcatatccgaggacaccaggacctcccttgttgcagagtgagggagatgccaagggttgtgcagtgttggtgcagaggggcccagacctcagtgggcagttcaggagcaactgtgtgatgcactggccagacagcactgtccttttacgacaaactgccagacatccctggaacatggcttcctcatcacagtactggtgcccctgtcagaggctgaacaaaccccatttctgcttcatctgttcaagcctgcttcctctctggagccaaggataggcaagagatcgtcggaatagtctgtctgcagcacccagcctgtctgtcttgttcttctgtgtacatctctaactgtagtccttttgtgtatgtcgctagagcacagtggggtaagatatcctataaacgcctgttgagtttgtctcttgaattaaacttattcctggttaactacatgatgaaatcgtgggcttaattcagcagctctccaactccagcaagcgtccaaggcagactgggacagctggcacattttagccacccttttgttcaaggtgccccgtgcactcaaggatttaatgcactgccacctgggagagctcaaggacaagagctgagacagtctagatagacagaagtcaagtggcactggcatttacatgtgtgccctctaagtagccctggatgtcttggaacttactgtgtagaccaggcctcaaactcacagatgtctgcctgcatttgcctcccaagtgctaacattaaaggcatgtaccaccacg

SEQ ID NO: 167 - DNA, 2690 bp, Mus Mus
ccacgcgtccgagggagcatttcctctgaaatgggtggagggaaaggaggaggccacactgctgatttagactgcagtctaaatccaagagggcaggggacccagagcacgcaatgacaatcattgattagtagtgttccctgacgctgccggcgaaatttccaggacatctccattctggggtggcagactcaccctagtgggcaagccagtgcaagctgcagacctcacagggtcttgtggccatttgcagagcgccacctggcgggccaagcgtgcatggttcagcagcttccgagtggaccatggaggcacccatttgtctggtggaaaactggaaaaatcagctgacagtaaatctggaggccataaggattcttgagcagatagcacagcctctggtggtggtggccattgttggtttatatcgtacagggaaatcctacctcatgaatcgtcttgcaggacggaaccatggcttctccttgggctccacggtgcaatccgaaaccaagggtatctggatgtggtgtgtgccccatcccaccaagccaacacacaccctggtccttttggacactgaaggccttggtgatgtagaaaagggtgaccctaagaatgactcatggatcttcgccctggctgtgcttctgagcagcacctttgtctacaacagcatgagcaccatcaaccagcaggccctggagcagctgcattttgtgactgaattaacacagctaatccgggcaaaatcgagccccagagaggacaaagtgaaggactccagtgagtttgtaggtttcttcccagactttatctgggctgttcgagattttgctctggagctgaagttaaaaggtcggcccatcacagaagatgagtacctggagaatgccctgaggctgatcccaggagacaatcccaaagtccaacagtccaacatgaccagagaatgtatcagatatttttttccggtacggaagtgctttgtctttgacaggcccacaagcgacaaacgtttattgctccaaattgaaaatgttccagaaaaccaactggaacggaatttccaggttgaatcagaaaaattctgttcctacatcttcaccaacggcaagaccaagactctgagagggggagtcattgtcacaggaaatcggctggggactttggtgcagacctatgtgaatgccatcaacagtgggactgtgccttgtctggagaacgcagtgacaaccctggcccagcgtgagaactccatagctgtgcagaaggcagctgaccactacagtgagcagatggcccagcgagtgaggctccccacagacacgctccaggagctgctgactgtgcatgcagcctgtgagaaggaagccattgctgtcttcatggagcactccttcaaggatgatgagcaggagttccagaagaagctggtggtcaccatagaggaaaggaaggaagagttcatgcgacagaacgaagcagcatctattcgtcactgccaggctgaactggagaggctttcagagtccctgaggaagagcatctcctgtggagctttctctgttcctgggggtcacagcctctacttagaagccaggaagaagattgagctgggctaccagcaagtgccgaggaagggagtgaaggcaaaagaggttctcaagagtttcctacagtcacaggctgttatggaggactctatcttgcagtcagacaaagctcttacagatggagagagagccatagcagctgagcggacaaagaaggaagtggctgagaaagaactagagctgctgaggcagagacagaaggagcaagagcaagtgatggaggctcaggagagaagcttccgagaaaacattgctaaacttcaggagaagatggagagcgaaaaggagatgctgctgagggagcaggagaagatgctggagcacaagctgaaggtccaagaagaactgcttactgaaggattcagagagaaatctgatatgttaaagaatgaaataagtcacctgagagaagagatggaaagaacaagaaggaaaccctcactgtttggtcaaatccttgataccgttggcaatgcgttcattatgattttaccaggagctggtaaactatttggtgtggggctgaaattcctcggctcactaagtaattagtgtaaagagtttctgggaaggaatttataaaatccaggcttctattattttgataccaaactttctgctctgattttaaaatacacataataaccactgttacaaagaaggtcagaacttccattaatagctaaattgtcagatactgcttcctcggagtctaattctgtgtcagttcattacctattatatttaaggttaaagatacaaaccaatgattgaagaatataagggtctggcatccataaatcctgtcaaatttcagtgacataatctaaataataaagagggaggccagtcagaatatagtgaaattatttctagaaaagatgtaagtaaatcaaacagaaacatggccaaatgaagacacattggcatatgtatcccagttgtacactacagataaattgttaaaaagagctcttgttaaaacgtacaagtgggttttcataggagaatgtatgaggaaaatgtctgattgataataaaaggagtgcagattaaaataaaaaaaaaaaaaaa

SEQ ID NO: 168 - DNA, 3268 bp, Mus Mus
gggactcttggaggcggaagcgctcgctccggtcatgtttcttggcgctctctggttgctgctgctcctgccgctgcgccccccgggagcgcagggccaggaggccgacgagcccaccccttggccgagcgtcaaaggcctgaaggagcagctgaggaaggccggtgccctctccaaacggtactgggagcttttcagctgcaccttgtggcccgatcactgtgaagaccaggagacccccgtgccgcctctgggctggagccttcctctgtggggccggcggtcgctggatgtgctcactgcatggctctgtcgctttcaggactgctgcagcggcggcggcgattgcaggatctccaacaacttgacaggcttagaatcagacttgcgtgtacgactgcacggccagcatctcgctagcaagctggtcctaagagcagtgaagggctacttagagatgccccaagtaggcaaggccctggctctgtcattccacggctggtctggcacaggcaagaacttcttggcacggatactgatggacaacctgtatcgggacggcatgaggagtgactgtgtcaagatgtttatttctaccttccactttccacaccccaagtatgtggacacgtacaaggaagagttgcagaggcagatgcaggagacgcagtggcgctgccaccagagcacgttcgtctttgacgaagcggagaagctgcacccggggctgctggagctgcttgaaccctacctggaaccgaggagccctgaggcccgtggagttgaggcgccccgagccatcttcctttttctcagcaacctcggaggcagtgtcatcaatgaggtagtcctgagtttgcttaaggctggatggtccagggaggaaattacgacgcagcacttggaggtgccccttcaggctgagatcatggaggctgcagacagcagctttggctccagcggtctcctgaagaaacaccttattgaccactttatccccttcctgccactggagtactgccatgtgaggctgtgcgtccgagatgccttcctgggccaggatctcccatacacagaagagaccctggatgaaatcgccaagatgatgacatatgtccctgaggaagagcggcttttctcctctcagggctgcaaatccatttcccagagaatcaacctcttcctgccttgaaagtgactcctgtgcaccctaaacaatcctcctccacaagagacagccatctgccaggtgccctggcgtccagcaatcactgctttcagctggtgtgcaagaggcagttcctaacagaggcagtttctaaaaaccacttggtgccttaaaaacctacattctagacaatctagactgagggtcaggaagccagtggaacggaaggtccaagtaccaaaggatcctcagaacactccctacagtctcctggcaccgtagctcttcctggaaggcagctggagttcatatgagcctgaggctctaggatctttgggctacagaacaaggaatatgtgtggactagaggcgtgtggtccaggtctgcaggtctggctggctttccttgctttccggcaacgtgggggagaggggcagcttctgcatgtgagaccagcaaagggccttaggctaaaggacaaactgaagctttcaaaacaggatgggtgtggcccagcactgtagtaggctaatatgggagagagagctaaagaaacctgagctgcctcgtttgagcagcctgccaggcttgaccaaaactcatgtgtatggatagctaaggcatgttctgttgtgcagactgaaaactttttaaagaggcctcgtcatgtgtaattaaatcttgtatttttctaacatcctttcttactgagacctggtccttgcactgccctggcaggctggcacagcacgtgctggtctcaggctactttagagcttcttactaaactcctctgactcagccctcgaacacacgtgttctccgctccagctcggacaagtggttcctgaggctgatgtggcgaggcaggtcagtaccacctgtctttagaataccatgggccattcttttctggtcccttcacactttttaaacatacaggtctttgtgttttctcagaatttccccctcttattcaaagtcctgctcagcactctcacctttagttcttgtaaaaatggaccatttctgcaacccccacttaccagtacatgtgtactcactcacctgccttaaggctagggaccacctagcccagccatattcaaataactgaaataaaggagtgtggtttggaagtgggatctcaattagcaaaggcagtcacaaagttcaaaagcttaggagttctgctgccacaaaccccagggacagaaatttaacaattaaggtttcttataaagcaagaccacatggtaattaataagcataaaatgcccaatgagacttagattcttgttcaagccaggtgcttccatgctgtccttgaatattcaggaggacagagcgggatgggcacaaagtgagaaccaagtgaactgtaacaggaatactagtgaatccctcccatccaagagccagacacaccgttctccctctcgacaggggatgctggagcgctgagcaggtcttacctgatctaacagaactgaaatccgagaataccctgtggtcacgagtattataggtaggaaagcagagcagggattataagcagaaacttacagttccagaacaaccagcaggtcagtggttagagtgaaatggaaaaatcttaattttgtgaggcaaagcccatgaggaaaacagctctgagaaactgcaacacacacacacatctcagacaggcactgtgcccaaaggactagaaaaacactaaactccaaattagtataataacgagcactacagtggtgaaaaagctccatgactcaagcactccgaagactgaggcaggaggctgtctagtgaatttgagactggctagggatatacagcaagactgtccctgtctttttgagacagtgtctcacacagctaaaaatggtcttgaactcagtacgtaaccctgaagtgactttgctttttcatctttcaagtgctataattacaggcatgtgccagtacacctggctttatctggtgctgggctcagatcctgggcttcttgctaggcaaggactttactgatgcccagccccaagaccctgtttctaagaatgacactggactggacaataaaaacaaggtcagtgcaa

SEQ ID NO: 169 - DNA, 393 bp, Mus Mus
atgtctggacgcggcaaacagggcggcaaggctcgcgccaaggccaagacccgctcctcccgggccggcctgcagttccccgtgggccgcgtgcaccggctgctccgcaagggcaactactcggagcgcgtgggcgccggcgccccggtgtacctggcggccgtgctggagtacctgacggccgagatcctggagctggcgggcaacgcggcccgcgacaacaagaagacgcgcatcatcccgcgccacctgcagctggccatccgcaacgacgaggagctcaacaagctgctgggccgcgtgaccatcgcgcagggcggcgtcctgcccaacatccaggccgtactgctgccgaagaagaccgagagccaccacaaggccaagggaaaataa

SEQ ID NO: 170 - DNA, 3644 bp, Mus Mus
ggtgacgctgggctctccgcgtgcagcgctgtaaaggagcgagcgccgcggccccctatagcagtcgcctgccgtcagcctcccgcgctcgtctctcgttactgctgcctgacgtccattgctgcctctccccgccgtcgccgacgtcgcctccccgcgcgctcccacaaccgccgcccggccggtcagtgaagccggcgagccattccccgcgccggcccccagaggcgggcatccagccggaccctgagtgtggccctctcgtgctgtggccgcccgcgccttctcggccgcttgtccagcatgaaaaccaagttctgcaccgggggcgaggccgagccgtcgcctctcgggctgctgctgagctgcggtggcaacgctgccccgacgcccggcgtagggcagcagcgggacgccgcaggcgagctggagtccaagcagcttggtggccgaacccaacctctcgcgctgccgccgccgccgccgccgcccctgccgctgcccccgccgccatcaccgccgctagcggacgaacaacccgagccccggaccaggcgcagggcctacctgtggtgtaaggaattcctgcccggagcctggcgaggccttcgcgaggaccagttccacatcagtgtcatcaggggtggtctcagtaacatgctgttccagtgctccctgccagactccatagccagcgttggcgatgagcctcggaaagtgctcttgcggctctatggggcaatcttaaagatggtgagtccagggttcacctgggaggggttggtccactgacatgccactctttcctaagatacctgcaaagagatcctaagtactatagacatgtactaaagatacttaactgcttttattttaattgggctgcacacttggcttattgtatacagtctaatattaattagtaaactaggacctagagaaatcaaggttgacctttgatagtgatttcttcattgaacttttcagcttatttttagctgataaattttaacgtggggaaggtattttagacctaatcagcaatattttatcctgtttatacaatttttatttaaaatattttgattttatgcatatggttgtttgcctgtgtgtgtttggctatcatatgcatgcagtacctgtggaggccagaagagggcatcagaaaccccaggactggcgttaaaatggttgtgagctactatgtaggtgctgggaattttacttagcctctctgcaagagcaactgctcttaaagtatgtacaagtattagcatcctgtttgaattgtttgagttttaaagaatgttacagttaaagtatgacttcagtgcaggtgaatggttgaattattaacatttctctgagagttctttaaagctttgaatttgttagattaataataattgttatctatctatctatctatctatctatctatctatctatctatctatttatttatgaggcaggatttcactgtagcccatgatgcctgggactcactatattaatccagactggtcttagacttgagatcctcctgttttggtctcctgcattctgtgattacagccacgtaccactaagcttgctgccaaactgtagttttgctttgttttttaaaaatctatttagtgtgtgtgaatgctttgcatgcatgtctgtctgtatgtcacttgcatgcctggttcctttgaaggccagaagaaggcaccagatcccctaggtctgcagttagagaactttgtgaactgctgtgtaggtgctgggaatcgaactctgaacctctagaagatcactcgtgcgttcaaccactgtgtcatctctagcccaaaagtaacattttaaagcatagtttttgaaaaaaaaaaaatggtgtcctttaggcacatttaatgaaacaatcttattctttttcctttgagaatcgctgtctgatgtgctccagtcttatcttttaaagcatttcctatctcagcagcacttttagatagctgctgaagtcacttctgttaaatctaatctatcgaatctgccacttctatgcacaaattaagtagaagcattttcttttttcttttttaaaaaaagtattattttatgtgtatgggtgtatgtgcactgggtttgtgcccaaggagatgaaagaaggtagcaggtccccggaaactggagttttcggcatgttgtgagctgtcgtgtggatgctagaatttgaacccaggttctctggaacagcagtgtccttaaccacggagccatctctagccctagtagaagcattttaaatgctcacagtatgttcttccatgtgttacactaaaactttcattttgtttttttgagacaggatctctccacactgtagcccaagcaggctacactcaaactcaacagcagtgcccttgtcttggcctccaagttataaatactgggattataggcctgagccgccatgtctagaccttgctgcactaatgagagctttgacatgctctgcaactgtgcttgacagttggtctagtaaggttgtcaccacttgaaatgcgacaaatgtgtgtggctgatgaactgaatttacattctattcaaattgacactgtcacatggacttggacgttagtctactggatagctgaactctgtgtaggtgtcatagaaagtcttacatagttaagataatgcaagtgtctgcaaacaggttttttcaaacagaattctatacctcagtttattttttgagaaaaacacatatactgttaggtagctcaaaaataaatagcagaatgtggactagcaagatggcttagtgggtaaagggcctgctgccaggtggctcaagtttagtctctgagacccatggcagaaggagaaccacgtcctgagactcctgaccccacacgtgcactgaagttgagtgcatgagcaacaacagtgagagcactaaattagatgtaaagacgagatttaagtagcaagtggttaagtctatctaaggtagaattcattagctcttaccctctgatagaagagaatgtactttacaaacagaccgtttgaattagggagaggtacatctctccagattcttttttttgtagttaggaaaatgttaaatcttccatttctgaagtgagatcccactgtaatagttggaggccatgtttgccagcctctgagtagaaaggtgcatgccgtatcttagcacataagaaccacataccaagccaggcgtggtggcgcacgcctttaatcccagcactcgggaggcagaggcaggtggatttctgagttcgaggccagcctggtctacagagtgagttccaggacagccagggctacacagagaaatcctgtctcgaaaaaacaaacaaacaaaacaaaacaaaacaaaacaaaagaatcacacaccagactgggcagtggtagcaaaaacctttaatcccagctctcaggaggcagaggcaggctgatctctgagttcgaagccagcctggtctacacagtgggtccaggacagccaggaattcctgtctgaaaaaaaaaaaaaaaaaaaaaaaaaaaaaaaaaaaaaaaaaaaaaaaaaaaaaaaaaaaaaaaaaaaaaaaaaaaaaaaaaaaaaaaaaaaaaaaaaaaaa

SEQ ID NO: 171 - DNA, 1362 bp, Mus Mus
gcaaaaaaaaaaaaaaaaaaaaaaaaaaaaaaaaaaaaaaaaaaaaaaaaaaaaaaaaaaaaaaaaaaaaaaaggggggggggggtttcccaccagagaactggctgcagggctcccagaaaggggcctaagcaaaaccttcaaggttcatttcaagggcaaataaagtcaatgaagtcaccttgtccctggctggccaggacttcggccatggggtactgacggccaaactggacatctccctctagacagcctcatgggacaaaatgagggtgaggacaacggactctgggtacctgctgcagtgacgcagacaagccctactaagcctggttacatagaagagtgagaccactgagcgggtctgactggtagcacatcctaccacagggcctggaaattttctcagggaaatccacagaagagtctgcacaaactcctgtgtgtggtaaggatgacaccaggagatagcaggtgagagctgcctttaaatcctgcgcctctcttcttgcttagccttactggagatggctgctgggagcaagacaggcatgaagacagttgacaacaaagagcagagtaagcttatcaactggaaaacaaacagaagacctggagctcaaaggcactggtcccagacagacagagaaaactcagcacggtttgaagagcgggagtgaaactataaagagcaggctggagctcagggcaagctgtccatgctcagagggaccctgaggaagctcaggctgcttccccagctccactggaaggacactgtgggaaaaggcactaccccgaggacacgagcaaagaacacgcagctgcgtccttaactggaacagagcctgcagcacttctgcacacagatggtctcactccagacaccaagcacttcctggggttcagaagtggattgacgagggtgctgctctctctctggagccccgaatgatcgtcatccccacagtcatccccacagtcctggtcccacctgctacagtttcagttagccacagtcaactgcagtccaaaacaacttaatggcaaattctagaaacaaaggattcatcaggtttctcatttgatgattttgttttgtttttcttttcttttgttttgttttaatgcagggtctcatgtagcccaggctggcatcaaatttgctatgtaattcaaggtgatcttgaattcctgtttctcctcctccactccctaagtggtgggattcctggtattgatcacggcatgtggacatttgtaagctttattacaatgttcggttaggattattttatcttgctgttactgttaacctcttactgtacttaatttatgaattaaaatttaccgtaaatactc

SEQ ID NO: 172 - DNA, 1951 bp, Mus Mus
ggcctgacgctccgctccgcaagatggcggcggacagtgagcccgagtccgaagtgtttgagatcacagacttcaccacagcctcggagtgggagaggtttatttccaaagttgaagaagtcttgaatgactggaaactgattggaccctctctgggaaagccactggaaaaggacgtgtcactccctgactggctgcagcccatcggccgagttgacgtcacggggaaggcagagcacatggagtgaagaaccaccctcggcacatgcgcagattatttgtttaccacttagaacacagctgtcagcgccatcttgtaacggcgaatgtgggcgcggctcccaacatctccccctatccttttaataagagcaaataggccacccatattaatgagagtggagatagaggtcaaatccccagtgtgtaggtaaaggagccatgtacaggattagctcttaggctcacaggcttttacccagagcaaccctgacctgctcccgtgtcgttttgcctgggggaagggaactaggacactgaaccttcatgaaagatgacatgtctccctagaataggctcatatatgccgcagagcctttccattgcagtgcttagccgtgcaactctctcgggctgctgaaacacactcactctatcccgtgcaatgagactagcctcgtgggatataagagctgagtggccagcgacctattgcctaagcatagataaccatatatcagggggagctccatgttctagtcctgcaagcgcctgggcaataaccaccttgtctctcctagtttaggccttaagcttacagaccaatcaaagaagcaacactaatccacagcaaagtgtatctccaaataatattaatcccacccattttttaaagaaagaaaatgctgaggagatccaattgggtaatcctttggtcagggacaggtccaagcgcgtggagttgacctgaagtctcaattcccgaaggatctgttcaaattcagccatccaattctgtaacatatactgaaaaagactttttgacaaattagctgccctagtaaatttaacatactgaatggaaataacacacaattccggaaacttttgttcacatcccagctgagttatttgtcataatacatctagttgtatctggacaagatctatgagttgattaaccagcatgagacctctctgtatcttgacattagctgaggcctgttcatctatgactgtagtcactgaggctgacaaagtgttaatggtgtcagtcgtctggacctgtccagacagagccaaggctgtctgaatcaaggccaaacccagttcccagttagtggtaaaaaagcaggagaatacttgagcattatacatcaccgtcattgggagtggaaatgtcgacattatcccccaacgctgctctctttttattattgacgcccctggacatcaccaagacgagggacattagtattcccttggtcagtctggatttttcgggacgtgtcactccctgactggctgcagcccatcggccgagttgacgtcacggggaaggcagagcacatggagtgaagaaccaccctcggcacatgcgcagattatttgtttaccacttagaacacagctgtcagcgccatcttgtaacggcgaatgtgggcgcggctcccaacaaccacctggctcctaaattcttttaaagtaaaattgatcattgtttttattattatactgaaaagacctttcaatctcagtatttgctaagaggtttcagcttcatggaagtgataacagaatttagatagtaagatctttttcccattatgagtactatatataggaattgcagtatttaaagatatgttgaaacatacagaataagttggtgtcctatattaaaatattttcatttaaacttttgaataaagaaaaaaaatgtgaagttccc

SEQ ID NO: 173 - DNA, 3861 bp, Mus Mus
gtcctagtaggacatacagctgctatggaaactctgtgagccacgtctgaagctgccttggtctcgagtttgtaacgcatttctagatgaagaactctacttaaaaaaaaaaaaaaaaaaaaaaaaaaaaaaaaaaaaaaaaaaaaaaaaaaaaaacccgccgggctttcggctggggttcccaagataaaaaaagtcctcacctgactgggtaagcccataggctgtggaaacagagactcacgctgcaccctgccactcacctgacctgtgagccttgcagtcactgacaagaaggttagcccactaggcctcccttcctacgctgtaaaggggcccagtccagctttgcctggtttctcattacaatccccttgccaagacgtctgccagggctgaaatcagccttagctgatcaatatccctctccatcttacttcctgctcccctccacgcccccaccccaccccatgctggaaggagagggtaatttaggaaaatccctgagaggctggcccttctctgggggaaaagatggtaatagtaatgtctaagcagcaggtacccttaggaccctgatataaaaccagattctctgacccaacccttgcgagtcaaaggccctggaggagagcctggcgttcaggttttaacccagccacaggcacttcctttgggcatcagtttggaaaccctggtttgaatgaagcagtacattctctctcacacaggatctgtctggtcctggctatctttctcccggtttattcaacactgccaggtctgcctagttggaacctaatttctccctctcgtaatgaggagaaatagccttccttttggtaattcctcctgtgataagcgtgcatctcatattctgtttttccagataaggtgtgaagtggggctggctttaacaacatcagcaggaagttgtcagttgccaaggcaacatgctggtgggaggaaggagaattgtcctacttttcacagggaaggttaagctcattctgtgccctcacagacaatggggcagggtagcagagaggaccttgcatctgagtgcttggtaacagagatgtgtctggccgtttctctcgcctctgagtttcttttgaaacctttcaggtgaatagcagtgacaagtttcactctgaggctctgtcaagaatttcaggacctcaatacagttacacatcactttttttttctttctagaagaatttctgagatggtattcaacaacagacggaaataagataaacacatgaaaggaagagattagagaaaagaaaatcacgatgcccataaggggatccttccattgtcccgagtgtcagctacaagacacagccaccaccggggacaaaatgaaactcaggagttcctggtggcaaatgggaaaaaaaagaggaacagtgtgggtcaagggtcccctcatcctttccagagagagcagacatcatcaggaaaagcaaacgatttcctagaactacagtctaagagcaactgatggtgggggactccacgtaaggtacacaagtatatttaacacagcgccagtgctagccgcggaatttatctgtcttttagggaaataaatttcagaactcagcaggttgacagtgtctcttcaaatttacagcatcaatgtgcggtgaaggaggggcttcccacatctcgctttactggaccgtctatcaacatttgatcaaattgggccaaagtttcaaagtacccttaaattatacccagagaaagtgctaggacacgctgaatgcctgtgcaggcttcagaatcatgtcctcgtgaggtggaagcatcttcgaaaaaatatatcatgcccatttcccctaacctgggtgcgtctttagaatacttaaaattcaaatgtatctgccagcccaaggttgcccataatcccaaggtggcccatttcacagagaggcacccaagctagcaaggcagtcctgtgcagaatgcactaaagcaggagttgctgcaggtgcctcgagagtcaacagggtaagtgagcgctttctccacagtctgcactgtcacagtttgtgtggaataattacgcaaaggagcctatgggagacggtctcattcaaaccaccccacagcctgtgttccgtagtctctccgaacccaagccaggagcttgactgtggttatgaatcttgcgaataaaggtttcactgtactttgtcttacatataaggtcatgtggatgcctagtggaagacactcatgaggcgggttctcacggccttcaaggttagccctgtcctatactgagagatgtgacgactcataggttacactgatagtgacagaagtgaaagttgggaatacgctaaggtagaaagatgaaagtggctactgtggtgtgaatgaaaaggtccccctctctccccatccctggctcctgagtttgaacacttggtccccagttggtggcagtgcttagtgagcttatgaggccttgctagaggaagtatgtcattggggtaagctttgagggcttataacatcactccttatcctattgtctctctgcttgttgtgtgtggttgaaacgtgacttctcagcgtctccttcttgccaccacaggtccccaacctttagagactcaacctctgcaaccacaggcccaaatacagttagacatagaactgcctctgcaaatatggaccgcatgaaatgtcccctcaggctcataggccagagcagtaggcctccagctggtggcgctatcttgtcgtttcccatgggtgctgatctgtatgtagctggtggagagatacaggataaggcctggcctttgtgggcttccactctctcctgcttcctgcccaatctctctgcctcctcagcctccgaggtataatgagcctatgtctctgctgtcatgagatgatgatgggttgaaaccacaggcccaaatgatccttttcccttaaagctgttccaatcaggtactttggtcacagcaagaagaaaatattattgattcaaagtatcatcaatgtactaaatttttaaaaaatcagttttgtagaaatctcaaagcgtggtggcatttcttccttttgtactttaggcattgatcgagtccattttgtgatttatgcttttgggccttgctcagtagcacactgagttgggaaaagccaagggtttggctgttgagagaggtgagagacctttatatgagaaaccattgtagcctgtgttcaagtttcacctttgtggttgagtctagtctcggattttgttctcttgttgtcaagctgtcttgtttcccatgttattttgttccttgtcgctaaaacagcagccaaagccaccacagaaactattgagtggtcatcaatacaaatatcccaaatatctggggacatgcctctctctgcgtttgcagttttttggagcaattgagatttggaaacagcaactcgtccactaaagtgcagcacgtgggtgagcatcggcaagtgctccgcctgggttctcagactcccttgctctcccaagaactctgtttgcccattagtgttaaacgtcagttagtgttctgtcctcgtggctgttttgcttggatttgttgctcagctctgaaaattggctctgagcaacaaattgctataaaagagaagccatttgtttgttggtgttttttcttttcttttcttttcttttcttttttcttttttcttttctttagtgaagtaaatgtgggtgggaaggagaaagggtggctgtttcacttcctgtgaaaaaggaaagaaagaaggaaagaaagaaagaaagagagaaaattaaagaaagaaagaaagaaagaaaggaagagaaag

SEQ ID NO: 174 - DNA, 1724 bp, Mus Mus
gaggagccgagggtgggcgtgtccacgctccggtagaatacgtacagattaaggaaattgccgagtcggttcgtaaatacggaaccaatgctaattttaccttggtacagttagacaggctcgctggtatggcactaacgcctgctgactggcaaatgattgcaaaagccgctctccctagtatggccaaatatgtggaatggcgagctctgtggcaggaggcggcacaggcgcaggcccgagcaaacgctgctgctttaactccagagcagagagagtggacttttgatttgttaacgggtcagagagcttattctgctaaacctgataagaggtatcaatggaaggtcttaccacaggggatgtccaatagtcctacaatgtgccagctttatgtgcaaaaagctcttttgccagtgagggaacaattcccctctttaattttgctcctttacatggatgacatcctcctgtgccataaagaccttaccatgctacaaaaggcatatccttttctacttaaaactttaagtcagtggggtctacagatagccacagaaaaggtccaaatttctgatacaggacaattcttgggctctgtggtgtccccagataagattgtgccccaaaaggtagagataagaagagatcacctccataccttaaatgattttcaaaagctgttgggagatattaattggctcagaccttttttaaagattccttccgctgagttaaggcctttgtttagtattttagaaggagatcctcatatctcctcccctaggactcttactctagctgctaaccaggccttacaaaaggtggaaaaagccttacagaatgcacaattacaacgtattgaggattcgcagcctttcagtttgtgtgtctttaagacagcacaattaccaactgcagttttgtggcagaatgggccattgttgtggatccatccaaacgtatccccagctaaaataatagattggtatcctgatgcaattgcacagcttgcccttaaaggcctaaaagcagcaatcacccactttgggcaaagtccatatcttttaattgtaccttataccgctgcacaggttcaaaccttggcagccgcatctaatgattgggcagttttagttacctccttttcaggaaaaatagataaccattatccaaaacatccaatcttacagtttgcccaaaatcaatctgttgtgtttccacaaataacagtaagaaacccacttaaaaatgggattgtggtatatactgatggatcaaaaactggcataggtgcctatgtggctaatggtaaagtggtatccaaacaatataatgaaaattcacctcaagtggtagaatgtttagtggtcttagaagttttaaaaacctttttaaaaccccttaatattgtgtcagattcctgttatgtggtaaatgcagtaaatcttttagaagtggctggagtgattaagccttccagtagagttgccaatatttttcagcagatacaattagttttgttatctagaagatctcctgtttatattactcatgttagagcccactcaggcctacctggccccatggctctgggaaatgatttggcagataaggccactaaagtggtggctgctgccctatcatccccggtagaggctgcaagaaattttcataataattttcatgtgacggctgaaacattacgcagtcgtttctccttg

SEQ ID NO: 175 - DNA, 976 bp, mus mus
attgagaacgatgtctgcacattgaagccatgaccactttgtgtctgctttattctagcacaaaaccacctggatgttggtaggttttgggtgtgtacatttcagaggtatgtctattatgtcatgctctgggggaacagaggaggggtctcccatttacacttagcagagacccattgctccaccccaaagagtggcaggggtgacggaaggggagcacaggttagccgagcacactgaataaccctgtgctttctcagcccaaacccatctgccctccgcaaaccacagggttggtggagctcatatagaacagcaatcatcccatgcaggaagttacctaaaacatgtttgccacgtctaatctaaatgtttgcatcattacaatgtacaaacattacaatgtttgttgagccaaattaatatctgtagatggcaaattcatttaatttaagagctttattgggttttctaagtacttaatttgggttcttaggtgcctttctgacctgctattggctcagccttttggtattttgtttttttctggaaggttcttaatatgaaaatcaaaaaagcctaatagaggagttgaggcacacactaggtatatatcatacctatttccagagcaaaactataaagaatgatgaaacccaggcaaacagatcatccagtcagatgctatcacagatgctaattccccagaacccaatttatttatttattttttttgccttaaatgacatggttgtgtttttgtaaggaaaatttaatttaatataattatgtgcatttaactgagcagttccaaaagtcatgtacgaaaacaatgcaattgtctgtttcctgaaaaacaactaaatcaggaatagcacacccatttcaagctatcattaaaatgtaatttcctttgctcttttaccaagatgatatgttttaaactaaaacattaaaaagatgtctataaacagct

SEQ ID NO: 176 - DNA, 2654 bp, mus mus
taaaccggaaatgcctgttgtattttcctttgttcctctctgggaatgaatgagtctgcgcactgcctctctgcgcactgcctctctgcgcattgcctctctgcgcatctctctgcgcattgctgacgcactacgcagggcggggactccgcatagggcggaccttgaagccgactgccctgaggccaatcagcaaactggccttcgccagccgcttttggcttccttaactgattagctagcactttacctgactggtacccttttttctcataatgagctgcttcttcctcccagtctgtttcttcagaggagaattcatcatctgattcagagctaccaagagctggctccccgagcccatccagcgatgagcacaggctccttttcctagagacctccgctaattgatctttcttcttttccctttttcctctttttcttctaatctctctccaggtattcctacctaaccttaacttttcctcgggttcaagacccttggaaaggcctgtatacttattttgtgtaccatatttcctctttgttcctactctctctccccactttacttctgatagcttgtcctgaatttcatccagaatccgccctgccttaaccacttgataacatgtgaaaaggaacaaaagggcttctaacactagaaaaaattcaaggccaaacatattccactttacttctgatagactgtcttgaatttccttagaaagttcaagatcagacttacctcgtaaagctgtactcactggtactctcgttccccagctgaaaagttctgaattcatacagttgaatccttcttaacagtctgctttacgggaacctttattaccgcgacccgcagttctggttctggaatgagggatcttccttgcgccagtcccgagttttttctcgtcccggaattcggcaccaattgttattagacgcgttctcacgcccggccaggaagaacaccacagaccagaatcttctgcggcaaagctttattgcttacatcttcaggagcaggagtgcaagaagcaagagagagagaaaacgaaaccccgtcccttttttaggagagttatatttcgcctaggacgtgtcactccctgattggctgcagcccatcggccgagttgacgtcacggggaaggcagagcacatggagtggagaaccaccctcggcatatgcgcagattatttgtttaccacttagaacacagctgtcagcgccatcttgtaacggcgaatgtgggcgcggctcccaacaactcggcactaaggaagcagatagggggtctccagggcatgttagctagctagaccggccagaactgacagcaggccctgctttaataaagcagagagtggatgaggaagacacgtgcaggctcaaggatattctaatacacatacacacacaaacatacacaaagaaaataaatctgactgtccatagggaaatcttccttgttttgcctttatatgtagtctgctactatgtttttatatattataattgtggcacagaagtttttctgcccctgtggttcaatgaacatttttcaactgtgtatgtgtgtgtgtgtgtgtgtgtgtgtgtgtgtgtgtgtaggtcagaagacaacttgtggagtaatctcttagactatggagatcctaagataaagcccgggccatcagccttaatgggaaatgccctcgcgccactgagccatctcaatggccccccaagtaaaatttatgttttatccctgcattaccaacttgcctgtgtgactgctaaaagtccacctctacatttatttatgtatttcctctgcgggggcgagaggacgcatgcatgtgaaggtcggaggacatgacatgcacgagtcaggacattcaagatctcaggctccacctaagtgcctttattgtctcagtcttgagaacatgtagttgacatgacctctttggttctgttattttaggcaggctttatagagtataattaaggccaaagtaagaaatgcacatagtatgagcataggataatttgcacagattatattgacaggatgtctaaaatcactcatttactttctctaaacagttaattaactctgaaaactcagatacttacaatgtaaacaccaatgagttctagggcttattcatcctgaagcactgaacatgtgtcatatatatatctgttacctcccttccctctaaataccttcttgccagctagtctccagtggcctcaccattgaaaagacagtcacaccccacccagcagcaaacatcagtaactcctcaggaaaaggtccttttcttcgaaaatctaaaactaagtggtttgtcttatatgtggctgttcccaagacccatgtcatttcaacattttgtttgtttgtttgtttgtttgtttgttatttttgccttgtattgtttgagtttctcttattcttcacttccaaatagtaaccattctattaataagatacaaaacaggatttttgctaatgaattgactgactgattgattgtttgtttgattgattgatagttttagttagaaagatattcagcgtgccagcaggtgttctggtttcgctttactgtccccagatataatgaaatacaataaatttgtatattttagc

SEQ ID NO: 177 - DNA, 4764 bp, mus mus
  misc_feature (4218)..(4219): n is a, c, g, or t
  misc_feature (4239)..(4241): n is a, c, g, or t
  misc_feature (4252)..(4253): n is a, c, g, or t
  misc_feature (4322)..(4323): n is a, c, g, or t
  misc_feature (4329)..(4330): n is a, c, g, or t
  misc_feature (4336)..(4338): n is a, c, g, or t
  misc_feature (4357)..(4358): n is a, c, g, or t
  misc_feature (4367)..(4368): n is a, c, g, or t
  misc_feature (4381)..(4382): n is a, c, g, or t
  misc_feature (4399)..(4400): n is a, c, g, or t
  misc_feature (4431)..(4431): n is a, c, g, or t
  misc_feature (4445)..(4446): n is a, c, g, or t
  misc_feature (4450)..(4450): n is a, c, g, or t
  misc_feature (4468)..(4468): n is a, c, g, or t
  misc_feature (4486)..(4487): n is a, c, g, or t
  misc_feature (4496)..(4497): n is a, c, g, or t
  misc_feature (4578)..(4579): n is a, c, g, or t
gaccctgtctgtcttggtttccattaggtgagatgggctctatccttccctgttcttgatgtcctaacccttttccttctttataacccatctttgccatgatattttttgctttagctgaataccctcccaatggggcgttttcattggacaaaataaggcccaaatgctgcataatatcccttccccagaggttaaccgggagtgggagcacataaggtatgaatttcccttgctgtccttcagaggattcccacgtcaaggcaatggagcttatagtgggacatgattgatatcctaggccctgtaatgaatgagatgactctgtggtgggccatgctttgggccaccaatgtgtagaaattatactttcatctgctccggtatcaaggatgccttcaaactcttttccattaatcttaaggcggagcttaggtctatcatttaaagatacaaccaaataggcagaatcatttcctgaggagcccattttctttatctcaggtcctgcagatttctccctggtattatcagggaggagcagcagctgagctatcctatctcctttactaatagaaaaaacgcctttagggcttgagcacaggacctgtatttcaggggaatgttgacaatccataactccagggtggactactaagccctgcaaggtgagtgaaccccggccgagaataaggcccatggttcccgggggcaaggatggtataggctccactggcaccggctgaatactcatttgaggcattagtaggaagtcggaggcggcacgcaggtccacccttgtgggtcttcctgggtcgcctctctgactgcttcctgggtcctgacaaaccggttcccatatctttgagggccctgggaccgagggcccgatgacccgttttttggcacatcagttgattgactatcaggtgggggaaggactctgccctttatatccctcacagagcgacactggtcagctctatgataacccttgccacacttagagcaaagagtgagagtccctccctgtttatctggagctctgcaatctttcttaaaatgcccaggctttccgcaattaaaacatgtcctctgatcatttctgctcatggagcggttctgagattggaggatggcggccgctaagcctgcattggtgagaggtcccccaagctctcgacagaccctgagccagtcttgtaagcctttgttctttcttggggctatggccgctcggcactcctttgtggcttgctcatagattagctgttctatcagaggcgcagcttgctctgactctccaaaaatacgctctgctgcctctgtcattctggccacaaaatctgagaaggattcctgaggtccctggattatctttgttaactgcccggtggtttcacctgctcgagagagcgccttccaggccctaatagccgtggaagaaacttgggcataagctccccaatggtagtttgtctgatcagcagaataagctccctgacccgttaacaagtcaaaagtccaatctctctgctctggagtcaaagcagctgcgtttgctcgggcctgcgcttgtgcagcttcgtgccaaagcgctctccattccatatatttgcccatactagggagagcggcttttacaaccgtttgccagtcagcaggagttagtgccatgccagcgagcctgtctaactgcaccaaggtaaaattagcattggttccgtatttacgaaccgactcggcaatttctttaatttgtaagtattctaccggagcgtggacacgcccaccctcggctccttcaaagaccggaaatgcctgttgtattttcctttgttcctctctgggaatgaatgagtctgcgcactgcctctctgcgcactgcctctctgcgcagggctgacgcactacgcagggcggggactccgcatagggcggaccttgaagccgactgccctgaggccaatcagcaaactggccttcgccagccgcttttggcttttttcttgaccaattagctggctggtaatgggctgcttcttcctcccagtctgtttcctcagaggagaattcttcatctgcttcagaactactaagagctggctccccgagcccatccagcgatgagcacaggctccttttcctagagacctccgctaattgatctttcttcttttccctttttcctctttttcttctaatctctctccaggtattcctacctaaccttaacttttcctcgggttcaagacccttggaaaggcctgtatacttattttgtgtaccatatttcctctttgctcctactctctctccccgctttacttctgatagcttgtcctgaatttcatctagaatccgccctatcttaaccacttgataacatgtgaaaaggaacaaaagggcttctaacactagaaaaaattcaaggccaaacatattccactttacttctgatagactgtcttgaatttccttagaaagttcaaggtcagacttacctcgtaaagctgtactcactggtactctcgttccccagctgaaaagttctgaattcatacagttgaatccttcttaacagtctgctttacgggaacctttattaccgcgacccgcagttctggttctggaatgagggatcttccttgcgccagtcccgagttttttctcgtcccggaattcggcaccaattgttattagacgcgttctcacgaccggccaggaagaacaccacagaccagaatcttctgcggcaaagctttattgcttacatcttcaggagccagagtgcaggaagcaagagagcaagaagcaagagagcaagaagcaagagagagagaaaacgaaaccccgtccctcttaaggagcattctctttcgcctcggtcgtgtcactccctgattggctgcagcccatcggccgagttgacgtcacggggaaggcagagcacaagtagtcataagatacccttggcacatgcgcagattatttgtttaccacttagaacacagctgtcagcgccatcttgtaacggcgaatgtgggcgcggctcccaacagctttgatctggtattttctcactatgctccctttctacccttctggaattgcagtgtatatcctgtgtcattatatgttggaaatatgtaatctgcttttcattttgattttatagggggttatagttaagagattgcatgaatgtcagaagagattttgaactttggacttttaaacagtggtgagccggttaaagaccataggacttttgaagttggatttaatgcatgcctgaattttgatatggctacaagcctatagtggccagggagtggaatgtgatggtttaaaaggaaatagcccccttagggaatggcactcttaggacgtgtggccttgctggaggaagtggtcactgtgagaaggctttgacgtctcagatgctcaagccatacctagtatggcagtcatttcttaatgtctgctaatctagatgtagaactctcagctacctctccaacaccatgtctgcctgcctgcttcctaccgtaataataatggactaaatttttgaactgaacgccagccccaatgaaatgttttcctttataatagttgatgtggtcatggtgtctcttcacagcagtaaaaccctaagactgggtccttgacatggctgtgtccattcagcaatattcattcagaatttcctcattccccacaatgcttggtcattattgaattgtcatctatgtataagtagagagagtattaagagagacatgctatcatcttcaaatcttgttttttaaatttcttttaccccaaacttttttcattgttttgggggcattgtgtgatttgtagtaatcatttttataattattttaattgtctttttaaagtttataaataggagccagacatggtgatatatacttataattttaaccttcaggaatcaggttagaaatatataaagtttgaggccatactgggccatgtagactctaataaaaaagaaagaaaagaaaaaaatgaagaatttattaaactaggcactggatacattagtaagcaatataagagtgaaggataggttccgtctttgccatcatgattttccctataaatttcattgtaataggactttttctggctttaacacatcaggcaggcatataagggaagaccccttatattgtgttaagcatnntgtaggggatatttaataannnatgtgaaatannggaccccctctatgggggtttattttttttccagaagagatattactataggttctgttattactccannaaggtnnggtgcnnnatggggagacttctaaaannttttaaatnntataaagggaagnnaggtacagggggagaanntttcctgcaaaagaggacagaaaaattgaanctggtttatttttnncaanttggggtatggcttgaancgtgaagttgataaattnntgacgtttnntgagatatagaacccacgtaaaaaagtgtagaattttctgtatatatggcgttgggttttggttctgacacatatagtganntgaagccccgtccacgttatgtatttttatgaaaaggaaaaaagaacaggaatgaggtgaggtaggaaatcaggttatgaagaatcttagtttatgaagtgaaagtttatgaaatgaaagtttataaaatttgtattaccttctcccctgcttttattttcctggaaagagctgacgtacaaagg

SEQ ID NO: 178 - DNA, 3898 bp, mus mus
aaatcttatctggggacaccacagagcccaagaattgtcctgtatcagaaatttggaccttttctgtggctatctgtaaaccccactgacttaaagttttaagtagaaaaggatatgccttttgtagcatggtaaggtctttatggcacaggaggatgtcatccatgtaaaggagcaaaattaaagaggggaattgttccctcactggcaaaagagcttcttgcacataaagttggcacattgtaggactattggacattccctgtggtaagaccttccattgatacctcttatcaggttccatgtgattaatagaggggatggtaaaggcaagtctgggcctatcccttggacacaaaggtatagaaaagaaacaatctttaatatctataataattaaattccagccacgtggtaaggcggaaagtacagggagacccctctgtactgggccaaataagttcatttgctcattaatggctctgaggtcatggagcagtctccactttcctgactttttcttaattacaaaaattggagtattccaaggtgaggtagagggttcaatatggcctagttttaattgttcctctaccagttgaatcacagcttctagtttttcagaggataggggccattgaggaacccacactgggtcccctgttttccatggtatgggccgtactgccccaatggccactaaggaaaaacccagaccctgtctgtcttggtttccattaggtgagatgggctctatccttccctgttcttgatgtcctaacccttttccttctttataacccatctttgccatgatattttttgctttagttgaataccctcccgatggggcgttttcattggacaaaataaggcccaaatgctgcataatatcccttccccagaggttaaccgggagtgggagcacataaggtatgaatttcccttgctgtccttcagaggattcccacgtcaaggcaacggagcttatagtgggacatgattgatatcctaggccctgtaatgaatgagatgactctgtggtgggccatgctttgggccaccaatgtgtagagattatacttttatctgctccggtatcaaggatgccttcaaactcttttccattaatcttaaggcggagcttaggtctatcatttaaagatacaaccaaataggcagaatcatttcctgaggagcccattttctttatctcaggtcctgcagatttctccctggtattatcagggaggagcagcagctgagctatcctatctcctttactaatagaaaaaacccctttagggcttgagcacaggacctgtatttcaggggaatgttgacaatccataactccagggtggactactaagccctgcaaggtgagtgaaccccggccgagaataaggcccatggttcccgggggcaaggatggtataggctccactggcaccggctgaatactcatttgaggcattagtaggaagtcggaggcggcacgcaggtccacccttgtgggtcttcctgggtcgcctctctgactgcttcctgggtcctgacaaaccggttcccatatctttgagggccctgggaccgagggcccgatgacccgttttttggcacatcagttgattgactatcaggtgggggaagaattctgccctttatatccctcacagagcgacactggtcggctctatgataacccttgccacacttagagcaaagagtgagagtccctccctgtttatctggagctctgcaatctttcttaaaatgcccaggctttccgcagttaaaacatgtcctctgattatttctgcccatggagcggttttgggattgaaggatggcagccgctaagcctgcattggtgagaggtcccccaagctctcgacagaccctgagccagtcttgtaagcctttgttctttcttggggctatggccgctcggcactcctttgtggcttgctcatagattagctgttctaccagaggcgcggcttgctctgaatctccaaaaatacgctctgctgcctctgtcattctggccacaaaatctgagaaggactcctgaggtccctggacaacttttgttaattgaccagtggtttcacctgctcgggagagcgccttccaggccctaatagccgtggaggaaacttgggcataagctccccaatggtagtttgtttgatcagcagaataagctccctgacccgttaacaagtcaaaagtccaatctctctgctctggagtcaaagcagctgcgtttgctcgggcctgcgcttgtgcagtttcatgccaaagagctctccattccatatatttgcccatactagggagagcggcttttacaaccgtttgccagtcggcaggagttagtgccatgccggcaagcctgtctaactgcaccaaggtaaaattagcattggttccatatttacggaccgactcggcgagctctttaatctgtaagtattctaccggagcgtggacacgcccaccctcggctccttcaaagactggaaatgcctgttgtattttcctttgttcctctctgggaatgaatgagtctgcgcactgcctctctgcgcattgtctctctgcgcagggctgacgcactacgcagggcgggggctccgcatagggcggaccttgaagccgactgccctgaggccaatcagcaaactggccttcgccagccgcttttggcttccttaactgattagctagcactttacctggctggtacccttttttctcataatgagctgcttcttcctcccagtctgtttcttcagaggagaattcatcatctgattcagagctaccaagagctggctccccgagcccatccagcgatgagcacaggctccttttcctagagacctccgctaattgatctttcttcttttccctttttcctctttttcttctaatctctctccaggtattactacctaaccttaacttttcctcgggttcaagacctttggaaaggcctgtatacttattttgtgtaccatatttcctctttgttcctactctctctccccactttacttctgatagcttgtcctgaatttcctctagaattttcagccctatcttaatcacttgataacatgtgaaaaggaacaaaagggctcctaacaccagaaaaaattcaaggccaaacatattccactttacttctgatagactgtcttgaatttccttagaaagttcaagaccagacttacctcgtaaagctgtactcactggtactctcgttccccagctgaaaagttctgaattcatacagttgaatccttcttaacagtctgctttacgggaacctttattaccgcgacccgcagttctggttctggaatgagggatcttccttgcgccagtcccgagttttttctcgtcccggaattcggcaccaattgttattaaacgcgttctcacgcccggccaggaagaacacagcaaaccagaatcttctgcggcaaaactttattgcttacatcttcaggagcaagagtgtaagaagcaagagagagagaaaacgaaaccccgtccctattaaggagaattatccttcgcctaggacgtgtcactccctgattggctgcagcccatcggccgagttgacgtcacggggaaggcagagcacatggagtggagaaccaccctcggcacatgcgcagattatttgtttaccacttagaacacagctgtcagcgccatcttgtaacggcgaatgtgggcgcggctcccaacagaggtggctaggtagtactttagctaggcagagagaataagggagaagggcaggtcctgtcagagccatgtttgccatgcttcgacgggctctagtttcttcaattctcagttctttctaaaaatt

SEQ ID NO: 179 - DNA, 5108 bp, mus mus
gagtgagagtccctccctgtttatctggagctctgcaatctttcttaaaatgcccaggctttccgcaattaaaacatgtcctctgattatttctgcccatggagcggttctgagattggaggatggcggccgctaagcctgcattggtgagaggtcccccaagctctcgacagaccctgagccagtcttgtaagcctttgttctttcttggggctatggccgctcggcactcctttgtggcttgctcatagattagctgttctatcagaggcgcagcttgctctgactctccaaaaatacgctctgctgcctctgtcattctggtcacaaaatctgagaaggattcctgaggtccctggacaacttttgttaattgaccagtggtttcacctgctcgggagagcgccttccaggccctaatagccgtggaagaaatctgggcataagctccccaatggtagtttgtttgatcagcagaataagctccctgacccgttaacaagtcaaaagtccaatctctctgctctggagtcaaagcagctgcgtttgctcgggcctgcgcttgtgcagtttcatgccaaagagctctccattccatatatttgcccatactagggagagcggcttttacaaccgtttgccagtcggcaggagttagtgccatgccggcaagcctgtctaactgcaccaaggtaaaattagcattggttccgtatttacggaccgactcggcgagttctttaatttgtaagtattctaccggagcgtggacacgcccaccctcggctccttcaaagactggaaatgcctgttgtattttcctttgttcctctctgggaatgaatgagtctgcgcactgcctctctgcgcactgcctctctgcgcatctctctgcgcattgcctctctgcgcattgctgacgcactacgcagggcgggggctccgcatagggcggaccttgaagccgactgccctgaggccaatcagcaaactggccttcgccagccgcttttggcttccttaactgattagctagcactttacctggctggtacccttttttctcataatgagctgcttcttcctcccagtctgtttcttcagaggagaattcttcatctgcttcagagctactaagagctggctccccgagcccatccagcgatgagcacaggctccttttcctagagacctccgctaattgatctttcttcttttccctttttcctctttttcttctaatctctctccaggtattcctacctaaccttaacttttcctcgggttcaagacccttggaaaggcctgtatgcttattttgtgtaccatattttctctttgctcctactctctctccccgctttacttctgatagattgtcctgaatttcatctagaatccgccctgccttaaccacttgataacatgtgaaaaggaacaaaagggcttctaacattagaaaaaattcaaggccaaatataccttgtaaagccatttcccactttacttctgatagactgtcttgaatttcgttagaaagttcaagatcagacttacctcgtaaagctgtactcactggtactctcgttccccagctgaaaagttctgaattcatacagttgaatccttcttaacagtctgctttacgggaacctttattaccgcgacccgcagttctggttctggaatgagggatcttccttgcgccagtcccgagtttttttctcgtcccgggtttcggcaccaattgttattagacgcgttctcacgaccggccaggaaagacgcaacagaccagaatcttctgcggcaaagctttattgcttacatcttcaggagccagagtgcaagaagcaagagcgagagaaaacgaaaccccgtcccttttttaggagagttatatttcgcctaggacgtgtcactccctgattggctgcagcccatcggccgagttgacgtcacggggaaggcagagcacatggagtggagaaccaccctcggcatatgcgcagattatttgtttaccacttagaacacagctgtcagcgccatcttgtaacggcgaatgtgggcgcggctcccaacatcagagagatggcccagtggcagagcagcaccacccactctgcactctgcatgtggcagcttacaactatctgcagctccaaatacaggaaacccaaggccctcttctatcttccataggtacaaggaatgcacatggtacacagacgtgcatgcaagcaaaacactcatatgcataaaataaaattaaaattaaatatacagaaaaatatagatatattgtagccagtacatgtataattctggctcaaacagtggaggcagtaaggtcaccagttcaaggacagcacaggctacataacaagaccctgtctcagaccctagcaacaggagcttgataaactgtcatagcccagcaaggaccaggtaaggccgcctcctatcctgatcacctgcaatctctcaagaaatgtatctcaccagcaaagatagataccactgaggctggagagatgtctcaagggtttagtgtgtgttgtgtattttctattaccccagcacctgtgccaggtggctcacaactgtgtgtaactctaggtccagaaaatctgaagcctctggccccagtaggcccctgcacacatgtgcacagacacacatatggatataattctaagaaatagaaaatacttttttgaaaaggctagacactcccttggagaaaaagaaaatgtatgacaagcaaatagaactaaagacaagcaggtgtaactattctaatatctgacaaaatagacttcaaatcagagataatgacagctacacgataccctcctagaggacaatctatcaagaggatatcagagttctgaacatataaatacaagtacaccaagtttcataaaataaatgctatttctccaagaaatgagtcattgaaacaaaaaaaaaatgatgtaataaattatatggacctaacagatacttaaagaagtttgacccagaggcagaagagatggcctaccaattgcagaggacccagacttggttcccagcaccccatgataggtcacaaccatcagtaattccagttccaagtgatcttacactctctggagacccccataaataccaggaatgcacatgacccacttacatacatgcaggcaaaacattcagacacataaaataaaaataaatcattttttaaaagaagaaattttacccaagcactaagaaaatacatccttctcaggagcacatggagtgttctctaacatagatcacatttgtaggaaggaaagcaagccttaacaaacatagtacaattgaaataatatcctgtgttctcactggtcacaatgaaccaaggctaaatatccacagcagtaggaatggcacaaggtactcatggaaactagacagcacgaacacacacacacacaatgataaacaaatcaagaaataaaataattcctataattgaatgaaaatgagtatacaatatgccaaataagtgggaaaaaataaaagcaatcttagaagaaaagcctatagaattcagtgcccacataaagaattattagataggctggagaggtggctcagtggataagagcactgactgctcttcaggaagtcctgaattcaaatcccagcaacacatggtggctcacaaccatctgtaatgggatccaataccctcttctgatgtgtctgaagagagcaacagtatactcacattaaatacatatatatatatatattcgatctcaaataaatgacttatgatgcactttaaaacattcaaaaaacacaaaagtagtagataggaagatgtaattaagataggaaattcataaaatagaagtgaaacttaaaaaaaaacaatatgaagaatcaatgaaaaattccttgaagagataaacaggaccagtaaacccttagccaatttcaccaaaagtaacaaagataaaacccaagttaacaaaattagaggtgaaaatggagacataacaagagataccaatgaaatccaaaaaaaggccatgctttaaaatgtaaattcctctaagttagaaaatataaaagaaatagatgaatttctagaatctagaagcctacgacctacccaaaattagattaaaatgagataggtaacttaaacagacctatactaacaacgagactaactcagtaaaaagtctcccaaccaattaaaacagaagtttacagccaacatcacaatgagtggagaaaatcctcaaagtattctcactaagatcaggaccaaagtgaattcattctcgtcactcatccaatacggtgctcaaagtcttgaccacagcaatatgacaagagaaagcaacagaaaggatacaggtaagaagagaagagattaaagagtccctttttcatattccatacagaagaaaccctaaggactccaccaaaaacaactcttaaatctaataaacatttttggcaaagtggcaacatacaaaattaatataccataactgtagcttttctaaacaccaagacaggcacactgaaaaagaaatcagcaaagcaattccaaaaagaaaaagaaaaaagaaagaattctgaaaatgtgggtctctgtgttaatcctatgacaacagagccttccccgaggagggctgactgatgcactaatctatgggtatatcagtaagttattaggagtcaattcaaaattatgttttagcaattgtgattgcgtacacaagacccatgcaagccaagcctgacctagtcaatcatagcacagagagagacaagacggacatagagtctcacccctaaacaaagagctattggcaattgatagccactgggaaggggggtcagttttctctaaaagcattgccactggcagatcacccacatttaatgaaaggccacgtgtccatgaatgtatgggaagcataaactcctgagtgaaaggagaaaagagggtacaaggttagagagggaagacaggagagagatggatgtgggaggagttgggggagagcatagatatgatcagaactcattgtgcaatattattacagccc

SEQ ID NO: 180 - DNA, 4076 bp, mus mus
taggtctatcattcaaagatacaaccaaataggcagaatcatttcctgaggagcccattttctttatctcaggtcctgcaaatttctccctggtattatcagggaggagcagcagctgagctatcctatctcctttactaatagaaaaaacgcctttagggcttgagcacaggacctgtatttcaggggaatgttgacaatccataactccagggtggactactaagccctgtaaggtgagtgaaccccggccgagaataaggcccatggttcccgggggcaaggatggtataggctccactggcaccggctgaatactcatttgaggcattaataggaagtcggaggcggcacgcaggtccacccttgtgggtcttcctgggtcgcctctctgactgcttcctgggtcctgacaaaccggttcccatatctttgagggccctgggaccgagggcccgatgacccgttttttggcacataagctgattgactatcaggtgggggaaggattctgccctttatatccctcacagagcgacactggtcggctctatgataacccttgccacacttagagcaaagagtgagagtccctccctgtttatctggagctctgcaatctttcttaaaatgcccaggctttccgcagttaaaacatgtcctctgattatttctgcccatggagcggttttgggattgaaggatggcagccgctaaacctgcattgctgagaggtcccccaagctctcgacaaaccctgagccagtcttgtaagcctttgttctttcttggggctatggccgctcggcactcctttgtggcttgctcatagatgagctgttctaccagaggcgcagcttgctctgactctccaaaaatacgctctgctgcctctgtcattctggccacaaaatctgagaaggactcctgaggtccctggattatctttgttaactgcccagtggcttcacctgctcgggagagcgccttccaggccctaatagccgtggaggaaatttgggcataagctccccaatggtagtttgtctgatcagcagaataagctccctgacccgttaacaagtcaaaagtccaatctctctgctctggagtcaaagcagctgcgtttgctcgggcctgcgcttgtgcagcctcgtgccaaagcgctctccattccatatatttgcccatactagggagagcggcttttacaatcgtttgccagtcagcaggagttagtgccatgccggcgagcctgtctaactgcaccaaggtaaaattagcattggttccgtatttacggaccgactcggcgagttctttaatctgcacgtattctaccggagcgtggacacgcccaccctcggctccttcaaagactggaaatgcctgttgtattttcctttgttcctctctgggaatgaatgagtctgcgcactgcctctctgcgcactgtctctctgcgcactgcctctctgcgcactgcctctctgcgcactgcctctctgcgcactgcctctctgcgcattgctgatgcactacgcagggcgggggctccgcatagggcggaccttgaaaccgactgcccggaggttgaacagtacgctggctttcgccagacgcttttggcttttttcttgaccaattagctggctggtaatgggctgcttcttcctcccagtctgtttcctcagaggagaattcttcatctgcttcagagctactaagagctggcttcctgagctcatctagtgacgagtatctcctagagacctccgctaatcgatcttttttcttttcttttttcttttccttccttctaatctctccccaggtattcttacctgacctaaacttttcctcgggttcaagacccgtggaaaggcctgtatacttattttgtgtaccatattttctctttgctcctactctctctccccgctttacttctgatagattgtcctgaatttcatctagaatccgccctgccttaaccacttgataacatgtgaaaaggaacaaaagggcttctaacactagaaaaaattcaaggccaaacattttccactttacttctgatagactgtcttgaatttccttagaaagttcaagaccagacttacctcgtaaagctgtactcactggtactctcgttccccagctgaaaagttctgaattcatgcagttgaatccttctcaacagtctgctttacgggaacctttattaccgcgacccgcagttctggttctggaatgagggatcttccttgcgccggtcccgagttttcttgtattttttcgtcccggattttttctcgtcccggaatttctcgtcccggaattcggcaccaattcttaatagcgttctcacgcccggccaggaagaacacaacagaccagaatcttctgcggcaaaactttattgcttacatcttcaggagctaggagtgcaaacccccagacccaaaagcgaaagccacccctatattgaaaccgaaaccccttccctatttaggagagttatatttcgcctaggacgcatcactccctgattggctgcagcccatggccgagctgacgttcacgggaaaggcagagtacaagtaatcgtaaaatacccttggcacatgcgcagattatttgtttaccacttagaacacaggatgtcagcgccatcttgtgacggcgaatgtgggggcggctcccaacagttgacagaaacgaaagaaatgaatctggtgaatgaataggatggcctagaaaagcagagatttgtgggattgccaatgtcccctgatcccctatattctctaaatgctttgtaacatctacaaacacacacacacacacacacacacacagacactagcacatgcatgcatgtacatacactcacataaaatacatatagacttaaagatttcaaaaatatttagggcttttatgagtcaggttcatttctcttagaaaaaaatctatatttttgagacttttctatgttttggttaaaaagacttggggaatcctaattttttttcttttccgggtagcgttttaaaaattttgttctcttttagatgtagaacgctgatgtcacacagacattcctgtctttatcccattgaaccatacaacccttcaggctgagttactaacaaatgagacaatacaaggaccatgtatataagccagtaatcacaagaatcattatacatgaagggaaagcacaatgagttatcactacggagggattgtgggagacttgaactaaaaacaaagaggccattcgcttaaaaacacacgaaatatatgtagtcatgagaaatctcagaagcccacagaaagcattctagcaaagagtttccaaacagggattaggcattatttatgcattaatgttagctcaacaaaaagacttatgcctgaccttttaacttagataatatgaaataatgaattttgttgaggtttctggatctatgttcacttgttacataagaggtcttaaaagatatcactatatacaaaaagcatcccattcccaaccctgcacacactctcttgtgcataaggcaccaacaaccttgaggaagttaccagaaaaggcagtataggaagagatgagtgatgagtaaatcttaaagacataacagttataataatgcactaaactagaatcaacagagatgtattccgatctttatttactaatgcttactttattttcttcactatgtttataaatattctgaaatcatccttttttaattacaaaaaaatggaaaatttctgtaggcagcacagtaggaatgggagctgaaaggagagatgaataatattccattgtgtgcatgtgccacacttttattatccattcatttgatgatggacatctaagttcattccatttcctagctattgtgagaagagccccaataaagatggataagcaagtggttttatggaaagatccaaagtctgttgattgtttgccttggaagaggtctggggagagttagaatgaggaaatcaatcaggggcgtatgaacacatttcttttttcatacatcatactc

SEQ ID NO: 181 - DNA, 3866 bp, mus mus
tagaggcagtgcgcagactcattcattccccgagaggaacaaaggaaaatacaacaggcatttccagtctttgaaggagccgagggtgggcgtgtccacgctccggtagaatacttacaaattaaagaaattgctgagtcggttcgtaaatacggaaccaatgctaattttaccttggtgcagttagacaggcttgccggcatggcactaactcctgccgactggcaaatgattgcaaaagccgctctccctaatatgggcaaatatttggaatggagatctctgtggcgagaggctgcacaggcgcaggaccgagcaaacgctgctgctttaactccagagcagagagattggacttttgacttgttaacgggtcagagagcttattctgctaaacctgataagaggtatcaatggaaggtcttaccacagggaatgtccaatagtcctacaatgtgccagctttatatgcaagaagctcttttgccagtgagggaacaattcccctctttaattttgctcctttacatggatgacatcctcctgtgccataaagaccttaccatgctacaaaaggcatatccttttctacttaaaactttaagtcagtggggtttacagatagccacagaaaaggtccaaatttctgatacaggacaattcttgggctctgtggtgtccccagataagattgtgccccaaaaggtagagataagaagagatcacctccataccttaaatgattttcaaaagctgttgggagatattaattggctcagaccttttttaaagattccttccgctgagttaaggcctttgtttagtattttagaaggagatcctcatatctcctcccctaggactcttactctagctgctaaccaggccttacaaaaagtggaaaaagccttacagaatgcacaattacaacgtattgaggattcgcagcctttcagtttgtgtgtctttaagacagcaaattgccaactgcagttttgtggcagaatgggccattgttgtggatccatccaaacgtatccccagctaaaataatagattggtatcctgatgcaattgcacagcttgcccttaaaggtctaaaagcagcaatcacccactttgggcaaagtccatatcttttaattgtaccttataccgctgcacaggttcaaaccttggcagccacatctaatgattgggcagttttagttacctccttttcaggaaaaatagataaccattatccaaaacatccaatcttacagtttgcccaaaatcaatctgttgtgtttccacaaataacagtaagaaacccacttaaaaatgggattgtggtatatactgatggatcaaaaactggcataggtgcctatgtggctaatggtaaagtggtatccaaacagtataatgaaaattcacctcaagtggtagaatgtttagtggtcttagaagttttaaaaacctttttaaaaccccttaatattgtgtcagattcctattatgtggttaatgcagtaaatcttttagaagtggctggagtgattaagccttccagtagagttgccaatatttttcagcagatacaattagttttgttatctagaagatctcctgtttatattactcatgttagagcccattcaggcctacctggccccatggctctgggaaatgatttggcagataaggccactaaagtggtggctgctgccctatcatccccggtagaggctgcaagaaattttcataacaattttcatgtgacggctgaaacattacgcagtcgtttctccttgacaagaaaagaagcccgtgacattgttactcaatgtcaaagctgctgtgagttcttgccagttcctcatgtgggaattaacccacgcggtattcgacctctacaggtctggcaaatggatgttacacatgtttcttcctttggaaaacttcaatatctccatgtgtccattgacacatgttctggcatcatgtttgcttctccgttaaccggagaaaaagcctcacatgtgattcaacattgtcttgaggcatggagtgcttgggggaaacccagactccttaagactgataatggaccagcttatacgtctcaaaaattccaacagttctgccgtcagatggacgtaacccacctgactggacttccatacaaccctcaaggacagggtattgttgagcgtgcgcatcgcaccctcaaagcctatcttataaaacagaagaggggaacttttgaggagactgtaccccgagcaccaagagtgtctgtgtctatggcactctttacactcaattttttaaatattgatgttcgtggccatactgcggctgaacgtcattgtacagagccagataggcccaatgagatggttaaatggaaaaatgtccttgataataaatggtatggcccggatcctatcttggtaagatccaggggagctgtctgtgttttcccacagaatgaagacaacccattttgggtaccagaaagactcacccgaaaaatccagactgaccaaggaaatactaatgtccctcgtcttggtgatgtccagggcgtcaataataaagagagagcagcgttgggggataatgtcgacatttccactcccaatgacggtgatgtataatgctcaagtattctcctgcttttttaccactaactaggaactgggtttggccttaattcagacagccttggctctgtctggacaggtccagatacaactagatgtattatgacaaataactcagcagggatgtgaacaaaagtttccgggattgtgtgttacttccattcagtatgttaaatttactaggacagctaatttgtcaaaaagtctttttcagtatatgttacagaattggatggctgaatttgaacagatccttcgggaattgagacttcaggtcaactccacgcgcttggacctgtccctgaccaaaggattacccaattggatctcctcagcattttctttctttaaaaaatgggtgggattaatattatttggagatacactttgctgtggattagtgttgcttctttgattggtctgtaagcttaaggcctaaactaggagagacaggtggttattgcccaggcgcttgcaggactagaacatggagctccccctgatatatggttatctatgcttaggcaataggtcgctggccactcagctcttatatcccatgaggctagtctcattgcacgggatagagtgagtgtgcttcagcagcccgagagagttgcaaagctaagcactgcaatggaaaggctctgcggcatatatgagcctattctagggagacatgtcatctttcatgaaggttcagtgtcctagttcccttcccccaggcaaaacgacacgggagcaggtcagggttgctctgggtaaaagcctgtgagcctgggagctaatcctgtacatggctcctttacctacacactggggatttgacctctatctccactctcattaatatgggtggcctatttgctcttattaaaaggatagggggagatgttgggagccccgcccacattcgccgttacaagatggcgctgacagctgtgttctaagtggtaaacaaataatctgcgcatgtgccaagggtatcttatgactacttgtgctctgccttccccgtgacgtcaactcggccgatgggctgcagccaatcagggagtgacacgtccgaggcgaaggagaatgctccttaagagggacggggtttcgttctctctctctcttgctttttcgctctcttgcttctcgctctctcttgcttcttgctctcttgcttcttgcactctgttcctgaagatgtaagaataaagctttgcc

SEQ ID NO: 182 - DNA, 2355 bp, mus mus
tcttcttatctaaacatgtaaatattgatttctctcaaaggaggaaatatgcgtgacatccatctgtcagacctgtaatggcctgacgccacgagggtttacccctacgtgagtagataaaatttgacaacaatctaaaggcattattaagtaatcagaatcactttcagtagaaccaatccctctggcagctcaaggaataccagaagaagaaaaaacagccatgtaggcttggcaaaattattattagttgagctattctgtccctttgtgatatagaaaagacaacttgaggacaagaacagagaacctgaagttcccctttacaattctgatctacaactccagggtagacaataagaccttgtaggctgcaagagcctgcctctgtcattattgtccagtggcttcacctgctcgggagagcgccttccaggccctaatagccttttcatttgattcagaactactaaaaactggctccttgagctcatctagtgatgagtataggctccttctcttagaagcctccgctgattgatcttttttcttttctttttccttctccttccttctaatctctccccaggtattcttacctgacctaaacttttcctcaggttcaagacccttggaaaggcctgtatacttattttgtgaaccatattttctctttgctcctactctctctccccgctttacttctgatagattgtcctgaatttcatctagaatttttagccctgccttaatcacttgataacatgtgaaaaggaacaaaagggcttctaacactagagaaagtttaaggccaagcatacctcgtaaagccattttccactttacttctgatagactgtcctgaatttcgttagaaagttcaagatcagacttacctcgttccccagctgaaaagttctgaattcatacagttgaatccttcttaacagtctgctttacgggaacctttatcaccgtcgttccccagctgatgagttctgaattcggcagttgaatccttctcaacagtctgtgttacgggaaccttataaccttgattcgcagttctggttctggaatgaggtatccctcctgcgccagtccggagttttttctcgtcccggattttctcgtcccggaattcggtaccaattgttattcgacgcgttctcacgaccggccaggaagaacacaacaaccagaatcttctacggcaaagctttattgcttatatctttatcgggccagagtgtaagaagcaagagagggaagcaagagagcgagaaaaacgaaaccccttctattttaaagagaacaaccattgcctagggcgcatcactccctgattggctgcagcccatggccgagctgacgttcacgggaaaaacagagtacaagtagtcgtaaatacccttggctcatgcgcagattatttgtttaccaacttagaacacaggatgtcagcgccatcttgtgacggcgaatgtgggggcggcttcccacaaattgtcagcagggaattgtttctacacagcttggggtgaagagaagtttgagcccttaatgactagaggtggtctgggagcctgaatggactctgtgctaagggcttagatggtgaataatagctctttctctgtttgctaccacaaataccttgcagcgagtatgccagaaacaagtcatgaagcaaactgccttctttaggaagaagggaaaacagacatgctacacaggccaaggggcagctcagtgtacagtgcttgtatagcatgttgtcctccgaggctgtgcattcaaaccccagggctgcccaggacggggatgagcaagtattgctctgcagtgggcaattcaggggcagaactgaagcgcggagttgattctgcttgtctgcacatggctgagaatgaggcagccaagaccaggaagcagtatctgactagagctgtgttcacatgagcatcatcacttggcaggctgcattctacaggaatggtgaggttgatgacatgcactttaaataccaatgtgagcttggggtgtagctccgtggttgcctagcatgtggaagtccctgggtttagttcagagtaccacccactccacccctcgaaaaagccaaagaaaataaataaaaattaataattaagacgtggcatggtaacacatatgtataatcccatctctcagaaggcagaggcgggcaaatctctctgagttgaggctggccaggaataagaccatttctcaaagaagaaaaggaaaggaaagggaaagggaaaaaaggaaaaaggaaaaaggaaagggagaaagggaaagggaaaagggaaaggaaaaagcaaaggagaaagg

SEQ ID NO: 183 - DNA, 811 bp, mus mus
ggtcctggatgttttgaagatgtagaaaaggcccatctctgtgggtgtggacccatgggagcagagagtatcctgacaaggactgagaggttaaggaaggagccaggctcaagcttcaaggggacatatgcctgaacaacaatgcaactctggatacaagtgcctgtgcccttcctcgagttgatggaatttagctactagatatatgctccatcagcttacaggagctccaaccatgatgtcctggtcatgctggtcaagaacggttccctcatcccaatccctgacttgggcttgcaacatgtcctagaacctggaccactagcaccagcagatgctgtaacaaaattcctgaacaggatgcaaaagtgtttcagctgagccttgagaggtgaacgtaccttggcacctgtcccctggatgggacaacttgaggaagggccatccatattcctgttccctacccaggacactgctaatgtgcatatgaggagaacacaagaccccaacctgctgcaggatggagagcagagacaactgaagccttctccataacacttgtgcattccttctgcaggcttcaaaagactaatctgtgattttagacacaggacaggaggagactgagaggtgaacgctagctaagccgcgtcttctaccagggcagtgacctgcaaatgatgttccactgactagatttttggatagtaattgttgtagtccaagagactctttgacaagacaagagtgtgtacatttggagcattctggggacataattttgatagtaatataattttctgtaacctgc

SEQ ID NO: 184 - DNA, 648 bp, mus mus
ggctctcttgcttcttgctctctcttgcttcttacactctggccccataagatgtaagcaataaagctttgccgcagaagattctggtctgtggtgttcttcctggccggtcgtgagaacgcgacgaataacaattggtgccgaattccgggacgagaaaatccgggacgagaaaaaactccggactggcgcaggagggatacttcattccagaaccagaactgcgaatcaaggttataaggttcccgtaacacagactgttgagaaggattcaactgccgaattcagaactcatcagctggggaacgacggtgataaaggttcccgtaaagcagactgttaagaaggattcaactgtatgaattcagaacttttcagctggggaacgagagtaccagtgagtatgtttggccttgaattttttctggtgttaggagcccttttgttctttttcacatgctatcaagtgattaagatagggctgaaaattctagaggaaattcaggacaagctatcagaagtaaagcggggagagagagtaggaacaaagagggagtatggtgcacaaaataagtatacaggcctttccaagggtcttgaacccgaggaaaagttaaggttaggtaggaatacctggagagagattag

SEQ ID NO: 185 - DNA, 734 bp, mus mus
gctctcttgcttcttgctctctcttgcttccctctcttgcttcttgctctctcttgcttccctctcttgcttcttacactctggcccgataaagatataagcaataaagctttgccgtggaagattctggttgttgtattcttcctggccggtcgtgagaacgcgtctaataacaattggtgccgaattccgggacgagaaaaaactccggactggcgcaggagggatacttcatttcagaaccagaactgcgaatcaaggttataaggttcccgtaaagcagactgttgagaaggattcaactgccgaattcagaactcatcagctggggaacgacggtgataaaggttcccgtaaagcagactgttaagaaggattcaactgtatgaattcagaacttttcagctggggaacgaggtaagtctgatcttgaactttctaaggaaattcaagacagtctatcagaagtaaagtggaaaatggctttacaagttatgtttggccttaaattttttctagtgttagaagcccttctgttccttttcacatgttatatagtggttaagatagggctgaaaattctagaggaaattcaggacagtctatcagaagtaaagcggggagagagagtaggagcaaggagaaacggtaagtatacaggcctttccaagggtcttgaacccgaggaaaagttaaggtcaggtaggaatacctggggagagattagaaggaag

SEQ ID NO: 186 - DNA, 3258 bp, mus mus; identical to SEQ ID NO: 7

SEQ ID NO: 187 - DNA, 3928 bp, mus mus
ggatttacttagcagtcggtcgcggagcaccatgcaggcgtcccggcacagcatccaagcggagccaggctggtacgtctctgcccagcagccagaggaggcggtggctgcagacgagtggagtccgttgctaagcaacgaacctcacaggcagggatcctccggtgcttcctttggtctctccgtctttaacgtgatgaacgccatcatgggaagcggcatccttggtttggcgtatgtgatggctaacacgggtatccttggatttagtttcctgctgctgtttgttgctctcctggcttcttactcagtccatctcctgcttgccatgtgcatccacaccgccgtgacgtcttacgaagatctgggactcttcgcttttggattacctggaaagagctgttattagacgcgttctcacgaccggccaggaagaacaccacagaccagaatcttctgcggcaaagctttatttcttacatcttcaggagcaagcgtgtaagaagcaagagagcaagaagcaagagagcaagaagcaagagagagaagcaagagagagagaaaacgaaaccccgtccctttttaaggagaattctccttcgcctcggacgtgtcactccttgattggctgcagcccatcggccgagttgacgtcacggggaaagcagagcacaagtagtcataagatacccttggcacatgcgcagattatttgtttaccacttagaacacaggatgtcagcgccatcttgtaacggcgaatgtgggggcggctcccaacatctccccctttttcttttaataagagcaaataggccacccatattaatgagagtggagatagaggtcaaatccccagtgtgtaggtaaaggagccatgtacaggattagctcttaggcttacaggcttttacccagagcaaccctgacctgctcccgtgtcgttttgcctgggggaagggaactaggacactgaaccttcatgaaagatgacatgtctccctagaataggctcatatatgccgcagagcctttccattgcagtgcttagccttgcaactctctcgggctgctgaagcacactcactctatcccgtgcaatgagtctagcctcatgggatataagagctgagtggccagcgacctattgcctaagcatagatatatcaggggaagctccatgttctagtcctgcaagcgcctgggcaataaccaccttgtctctcctagtttgggccttaagcttacagaccaatcaaagaagcaacactaatccacagcaaagtgtatctccaaataatattaatcccacccattttttaaagaaagaaaatgctgaggagatccaattgggtaatcctttggtcagcgacaggtccaagcgcgtggagttgacctgaagtctcaattcccgaaggatctgttcaaattcagccatccaattctgtaacatatactgaaaaagactttttgacaaattagctgtcctagtaaatttaacatactgaatggaaataacacacaatcccggaaacttttgttcacatccctgctgagttatttgtcataatacatctagttgtatctggacaagatctatgagttgattaaccagcatgagacctccctgtatcttgacattagctgaggcctgttcatctatgactgtagtcactgaggctgacaaagtgttaatggtgtcagtcgtctggacctgtccagacagagccaaggctgtctgaattaaggccaaacccagttcctagttagtggtaaaaaagcaggagaatacttgagcattatacatcaccgtcattgggagtggaaatgtcgacattatcccccaacgctgctctctctttattattgacgccctggacatcaccaagacgagggacattagtattcccttggtcagtctggatttttcgggtgagtctttctggtacccaaaatgggttgtcttcattctgtgggaaaacacagatagctcccctggatcttatcaaaataggatccgggccataccatttattatcaaggacatttttccatttaaccatctcattgggcctatctggctctgaacaatgacgttcagccgcagtatggccatgaacatcaatatttaaaaaattgagtgtaaagagtgccaaagacacagacactcttggtgctcggggtacagtctcctcaaaagttcccctcttctgttttataagataggctttgagggtgcgatgcgcacgctcaacaataccctgtccttgagggttgtatggaagtccagtcaggtgggttacgtccatctgacggcagaactgttggaatttttgagacgtataagctggtccattatcagtcttaaggagtctgggtttcccccaagcactccatgcctcaagacaatgttgaatcacatgtgaggctttttctccggttaacggagaggcaaacatgatgccagaacatgtgtcaatggacacatggagatattgaagttttccaaaggaagaaacatgtgtaacatccatttgccagacctgtagaggtcgaataccgcgtgggttaattcccacatgaggaactggcaagaactcacagcagctttgacattgagtaacaatgtcacgggcttcttttcttgtcaaggagaaacgactgcgtaatgtttcagccgtcacatgaaaattgttatgaaaatttcttgcagcctctaccggggatgatagggcagcagccaccactttagtggccttatctgccaaatcatttcccagagccttggggccaggtaggcctgaatgggctctaacatgagtaatataaacaggagatcttctagataacaaaactaattgtatctgctgaaaaatattggcaactctactggaaggcttaatcactccagccacttctaaaagatttactgcatttaccacataacaggaatctgacacaatattaaggggttctaaaaaggtttttaaaacttctaagaccactaaacattctaccacttgaggtgaattttcattatattgtttggataccactttaccattagccacataggcacctatgccagtttttgatccatcagtatataccacaatcccatttttaagtgggtttcttactgttatttgtggaaacacaacagattgattttgggcaaactgtaagattggatgttttggataatggttatctatttttcctgaaaaggaggtaactaaaactgcccaatcattagaagcggctgccaaggtttgaacctgtgcagcggtataaggtacaattaaaagatatggactttgcccaaagtgggtgattgctgcttttagacctttaagggcaagctgtgcaattgcatcaggataccaatctattattttagctggggatacgtttggatggatccacaacaatggcccattctgccacaaaactgcagttggcaattgtgctgtcttaaagacacacaaactgaaaggttgcgaatcctcaatacgttgtaattgtgcattctgtaaggccttttctaccttttgtaaggcctggttagcagctagagtaagagccctaggggaggagatatgaggatctccttctaaaatactaaacaaaggccttaactcagcggaaggaatctttaaaaaaggtctgagccaattaatatctcccaacagcttttgaaaatcatttaaggtatggaggtgatctcttcttatctaaacatgtaaatattgatttctctcaaaggaggaaatatgcgtgacatccatctgtcagacctgtaatggcctgagccacgagggtttacccctacgtgagtagataaaatttgacaacaatctaaaggcattattaagtaatcagaatcactttcagtagaaccaatccctctggcagctcaaggaatacc

SEQ ID NO: 188 - DNA, 3867 bp, mus mus
gcgacctcagatcagacgtggcgacccgctgaatttaagcatattagtcagcggaggaaaagaaactaaccaggattccctcagtaacggcgagtgaacagggaagagcccagcgccgaatccccgccgcgcgtcgcggcgtgggaaatgtggcgtacggaagacccactccccggcgccgctcgtgggggggcccaagtccttctgatcgaggcccagcccgtggacggtgtgaggccggtagcggcccccggcgcgccgggctcgggtcttcccggagtcgggttgcttgggaatgcagcccaaagcgggtggtaaactccatctaaggctaaataccggcacgagaccgatagtcaacaagtaccgtaagggaaagttgaaaagaactttgaagagagagttcaagagggcgtgtaagaggctctcgggtgtgtggctcttgctctgtgtaaccccctcatactagagttctgcttcatggtgtagaaattagggctgagggagttctaaaaaggctttgctgagtgtggcacgcagtggtgaggggaaactgctgtcttgttgtagagtgctgtcctctatgcatgacatgacatgacatggcatgaccatcaccattttgaatacgcaataggaagcctaccccagactgggcctatttgtgttccatgtagccaggagtggtccacgaagctccacactccccccaccccccttcaggatttataagcagttaatggtttctagctgggaaacattcacaaagcccagcccttccataggctaaataaacagttaatggtggctgagagacactttctccagtgatgcagtcacccatgaggaacccatgctccagtaggcaacaccaaattaaatcatcgcttcaccaaactaggctaggaggtttttcctttggcctgttgttggaacgcactctgagtgagtaggcatttgtctgtcctcctcagacaagttcatgcatttatcacagccagtgcctctgagcagttactacttctcttatctcaaagtagacactggatggctgactcttgaggagatgcccagggagtagcatacctttttggttgattggttagttagttagttagttggttttggttttggctagttttggacatctgcaagcaggtacctatcaagatgtcttggaactgagcatatcacctctgcctaggaccctgtcagcaaagcccttgggagttgaacccattggtgtggctgtgtagtatagaatacggtgacattgcctaaactgcccctgacctcatgacctccgggaacctctctgttctctggactgccagaataaagtgctacaaacttctcagagctctggaggctgagaacccaggaccaaggtgtcaacagggctgatttcttccaaggtctctgcttttgagttgccttagaagaaatggccgtcctacaaccatctttctgcaaccttttctcatctctagcatcaacctgacttcctaaggataccagcctgatgggataagaatcctgtgaacttcttcacttcagaaaggccctcccaatgtgttgtactctgagatccttagggaagggcttgaatttattcatttagttcccctttctgggcctaacacctcctaagtcactaacatcctgagtgaaaacagtagttgtgctatagaaagctgtcatgacctagcacaagaaccactgtaaggctccagatatgtcctttcaagaatccacagtctggagtgactctcagcactgagatctgcatgatctgaaactcatagaagcctcagcctccatgatgaggggtcattctgcaccccctttgagcttacctatgttccttctgtttgctgtgtgttactggctataggaatgtggttgccacagtcctgcagcttttcagagagcatttgggatagtatccctctcgtaaataagtgctggagacaattatgactttcacttgggaaagaatatcctgcaaccgataagttcgtttccttgtgcattgtgaagtcctagatcacaaatggcttctcaaagacccatgagatgagtctgcagccaaaagttcttgctgccacccttgatgacttgggatagtgaaaggagagacacaagtccttcaatgtcctctgactttcacatacattccatggcatgcccatgcctatatatatgcccagatacatatcccatttaaaaatgtaataaaaagttaagtgaatgcttgaagggactactggtcccgaaaggtcataacttgcaccctctggcaggctactgccggtgacatggtatggctgggcctgagtctggttctctaagtcagcatgcacagtctttctccactctgtagttgctcttccccaattctacagggaccacgtaaccatccagcctgtggggtgcttttccctgaatgtttccactgctcctggctttcactctgctatttactcctttcagagtcctcggcatcaattcttcactgtgtactggacaaaatgagttgcaggaagcagtgatgagggacacataatgctcagctgagtatcgcctccccccttcagccatggtgctgccacttagttgccctgtgacccagagtgctgtatttccagcatttcccctagaggttgaacatacatcttgtccctgtgaccctcaggctgtaggcaccaggtatgctcatgtctcttctgtaccccactcttgttgtgaacatgggagaaagaggtcacatgatagatgtttgctgagttattgctgtcatgagacaggactgtcagagcttccctagagcagttctagaacacatatgtgaagtgcaaacaataaagagccagccacatgtgctccaaccagcactgcaaggcctacccaaggccccagccctgcatggcccctcccctttccagcaccaagcttatcatttaaatgagcagaatatcagtgtcttcctgagttgcttctttcaatcaatgtgtttatgaaaacagatatttaaagtcctacagagaccaccaatgtcttaagctactgtggaaaatcccatgttacaaatacccatccgttttcccctgtccactgtcagtggacatggcagttttccccagattttgcctttaaaactgctgctgttgctactgtacctgtgatagtcatctgtctagtgtcccagctgactgccatctgtgggcaggtggcggaagaagagggagctgggctgagaaggagttccaggagtctggtgtccccttgagcctcctgcagaatactgtcatgagtgtgttttgaaggcaaggcagaagcagaacggctggcgagctgactgtcgagcattcccagagcactgaacataactagacccagaaaatatatgggcaagggtggcgaatattttctcagcattcttatttttaaaataatcaactactcacagtaaaatttattttgtattactccctatttggggttttataatatatgtagaagtaaaatacataacaagtgtagcacagaagataggactggggactggaaatgcattgtgatatgtttcttatgttcctgtgagcaagtggggacgttatttaagggtagatggtgataaatcatgatgcatattaacaatactagactgccactgaaaaccaagacatagagctcaaaatgaaatgcttatttttaaaacaaatctaaaggaaaaccaaggaaaggaagagtagatgggagaaatattgagctggaagattctaatccaaccacatcaataattacattaaatgtaaatgttcttaagattccagtaaaatggcatagatgaaaagacttgtcttt

SEQ ID NO: 189 - DNA, 762 bp, mus mus
gagggagtgatgcgccctaggcaatggttgttctctttaaaagagggaaggggttttcgttttctctctcttgcttcttgcgctctcttgcttccctctcttgcttcttacactctggcccgataaagatataagcaataaagctttgccgtagaagattctggttgttgtgttcttcctggccggtcgtgagaacgcgtctaataacaattggtgccgaattccgggacgagaaaaaactccggactggcgcaggagggatacttcatttcagaaccagaactacggatcacgtttataaaggttcccgtaacacagactgttgagaaggattcaactgccgaattcagaactcatcagctggggaacgacggtgataaaggttcccgtaaagcagactgttaagaaggattcaactgtatgaattcagaacttttcagctggggaacgaggtaagtctgatcttgaactttctaaggaaattcaagacagtctatcagaagtaaagtggaaaatggctttacaagttatgtttggccttaaattttttctagtgttagaagcccttttgttccttttcacatgttatatagtgcttaagatagggctgaaaattctagaggaaattcaggacagtctatcagaagtaaagcggggagagagagtaggagcaaggagaaacggtaagtatacaggcctttccaagggtcttgaacccgaggaaaagttaaggtcaggtaggaatacctggggagagattag

SEQ ID NO: 190 - DNA, 1082 bp, mus mus; identical to SEQ ID NO: 22

SEQ ID NO: 191 - DNA, 927 bp, mus mus
gggcgtggaatatggcaagaaaactgaaaatcatggaaaatgagaaacatccacgtgacgacttgaaaaatgacgaagtcactaaaaaacgtgaaaaatgagaaatgcacactgaaggacctgtaatatggcgagataactgaaaatcacggaaaatgagaaatacacactttaggacatgaaatatggcgaggaaaacagaaaaaggtggaaaatttagaaatgtccactgtaggacgtggaatatggcaagaaaactgaaaatcatggaaaatgagaaacatccacttgacgacttgaaaaatgacgaaatcactaaaaaacgtgaaaaatgacaaatgcacactgaaggacctggaatatggcgagaaaactgaaaatcacggaaaatgagaaatacacactttaggacgtcaaatatggcgaggaaaactgaaaaaggtggaaaatttagaaatgtccactgtaggaagtggaatatggcaagaaaactgaaaatcatggaaaatgagaaacaatcacttgacgaattgaaaaatgacgaaatcactaaaaaacatgaaaaatgagaaatgcccactgaaggacctggaatatggcgagaaaactgaaaatcacggaaaatgagaaatacacactttaggacgtgaaatatggcgaggaaaactgaaaaaggtagaaaatttagaaatgtccactgtaggacgtggaatatggcaagaaaactgaaaatcatggaaaataagaaacatccacttgacgacttgaaaaatgacgaaatcactaaaaaacgtgaaaaatgagaaatgcccactgaaggacctggaatatggcgagaaaactgaaaattacggaaaatgagaaatacacactttaggacgtgaaatatggcgaggaaaactgaaaaaggtggaaaatttagaaatg

SEQ ID NO: 192 - DNA, 936 bp, mus mus
gaaatgagaaacatccacttgacgactggaaatatgacgaaatcactgaaaagcgtgaaaaatgagaaatgcacactgtaggacctggaatatggtgagaaaacagaaagtcacggaaaatgagaaatacacactttaggaagtgaaatatgacgaggaaaactgaaataggtggaaaatttagaaatgtccactgtaggacatggaatatggcaagaaaactgaaaatcatggaaaatgagaaacatccacttgacaaattgaaaaatgacaaaatcactgaaaaacgtgaaaaataagaaatgcacactgaaagacctggaatatggcgagaaaactgaaaatcacggaaaatgagaaatacacactttaggacgtgaaatatggcgaggaaaactgaaaaaggtggaaaatttagaaatgtccactgtaggacgtgaaatatggcaagaaaactgaaaatcatggaaaatgagaaacatccacatgatgacttgaaaaatgacgaaagcactaagaaacgtgaaaaatgagaaatgcacagtgaaggaactggaatatggcgagaaaactgaatatcaccgaaaatgagaaatacacactttaggacgtgaaatatggcgaggaaaactgaaaaaggtggaaaatttatcaatgtccacagtaggacgtggaatatggcaagaaaagtgaaaatcatggaaaatgagaaacatccacttgacgacttgaaaaatgacgaaatcactaaaatacgtgaaaaatgagaaatgcacactgaaggacctggaatatggcgagaaaactgaaaatcatggaaaatgagaaatacacactttaggacatgaaatatggcgaagaaaactgaaaaaggtggaaaatttagaaatgtccactgtaggacatggaatatggcaagaaaactgaaaatcatgg

SEQ ID NO: 193 - DNA, 1724 bp, mus mus
cattatgagtgtgagaaaaacaaatcttgaaacattaaacttgtgacttcctagcttgtatgcgtttcctgaccgtccctttagcaagcagaagcttgggcacacctgagaagaattagctagtgtgggaagccgcccccacattcgccgtcacaagatggcgctgacatcctgtgttctaagttggtaaacaaataatctgcgcatgagccaagggtatttacgactacttgtactctgtttttcccgtgaacgtcagctcggccatgggctgcagccaatcagggagtgatgcgccctaggcaatggttgttctctttaaaatagaaggggtttcgtttttctctctctcttgcttctctctcttgcttcttacactctggcccccaaaaagatgtaagcaataaagctttgccgtagaagattctggttgttgtgttcttcctggccggtcgtgagaacgcgacgaataacaattggtgccgaattccgggacgagaaaaaactccggactggcgcaggagggatacttcattccagaaccagaactgcggatcacgtttataaaggttcccgtaacacagactgttgagaaggattcaactgccgaattcagaactcatcagctggggaacgacggtgataaaggttcccgtaaagcagactgttaagaaggattcaactgtatgaattcagaacttttcagctggggaacgaggtaagtctgatcttgaactttctaaggaaattcaagacagtctatcagaagtaaagtggaaaatggctttacaagttatgtttggccttaaattttttctagtgttagaagcccttctgttccttttcacatgttatcaagtgattaagatagggctgaaaattctagaggaaattcaggacaatctatcagaagtaaagcggggagagagagtaggaacaaagaggaagtatggtacacaaaataagtatacaggcctttccaagggtcttgaacccgaggaaaagttaaggttaggtaggaatacctggagagagattagaagaaaaagaggaaaaagggagaagaaaaaagatcgattagcggaggtctctaggagatactcgtcactagatgagctcaggaagccagctcttagtagctctgaagcaagtgaagaatcctcctctgaggaaacagactgggaggaagaagcagcccattaccagccagctaattggtcaagaaaaaagccaaaagcggctggcgaaagtcagcgtactgttcaacctcccggcagtcggtttcaaggtccgccctatgcggagcccccgccctgcgtagtgcgtcagcaatgcgcagaggggcaatgcgcagagaggtgcgcagagaggcagtgcgcagagaggtgcgcagagaggcagtgcgcagagaggcagtgcgcagactcattcattccccgagaggaacaaaagaaaatacaacaggcatttccagtctttgaaggagccgagggtgggcgtgtccacgctccggtagaatacgtacagattaaggaaattgccgagtcggttcgtaaatacggaaccaatgctaattttaccttggcgcagttagacaggctcgctggtatggcactaacgcctgctgactggcaaatgattgcaaaagccgctctccctagtatggccaaatatgtggaatggcgagctctgtggcaggaggcggcacaggcgcaggcccgagc

SEQ ID NO: 194 - DNA, 1170 bp, mus mus
agaaaactgaaaatcatggaaaatgagaaacatccacttgaagacttgcaaaatgacgaaatcactaaaaaacgtgaaaaatgagaaatgcccactgaaggacctggaatatggcaagaaatctgaaaatcacggaaaatgagaaatacacactttaggacgtgaaatatggcgaggaaaactgaaaaaggtgtaaaatttagaaatgtccactgtaggacgtggaatatggcaagaaaactgaaaatcatggaaaatgagaaacatccacttgaagacttgaaaaatgacgaaatcactaaaaaacgtgaaaaatgagaaatgcacactgaaggacctggattatggcgagaaaactgaaaatcacggaaaatgagaaatacacactttaggacgtgaaatatggcgaggaaaactgaaaaaggtggaaaatttagaaatgtccactgtacgacctggaatatggcaagaaaactgaaaattatggaaaatgagaaacatccacttgacgacttgaaaaatgacgaaatcactaaaaaacgtgaaaaatgagaaatgcacactgaaggacctggaatatggcgaggaaaactgaaaatcacggaaaatgagaaatacacacgttaggacgtgaaatatggcgaggaaaactgaaaaaggtggaaaatttagaaatgtccactgtaggacgtggaatatggtaagaaaactgaaaatcatggaaaatgagaaacatccacttgacgacttgcaaaatgacgaaatcactaaaaaacgtgaaaaatgagaaatgcccactgaaggacctggaatatggcgagaaatctgaaaatcacggaaaatgagaaatacacactttacgacgtgaaatatggcgaggaaaactgaaaaaggtgtaaaatttagaaatgtccactgtaggacgtggaatatggcaagaaaactgaaaattatgtaaaatgagaaacatccacttgaagacttgaaaaattacgaaatcactaaaaaacgtgaaaaatgagaaatgtacactgaaggacctggattatggcgagaaaactgaaaatcacggaaaatgagaaatacacactttaggacgtgaaatatggcgaggaaaacggaaataggtggaaaatttagaaatgtccactggaggacatggaatatggc

SEQ ID NO: 195 - DNA, 1133 bp, mus mus
ctctctacgtggaatatggcaagaaaactgaaaatcatagaaaatgagaaacattcacttgacgacttgaaaaatgacaaaatcactaaaaaacgtaaaaaatgagaaatgcacactgaaggacctggaatatggcaagaaaactgaaaatcacggaaaatgagaaatacacactttaggacgtgaaatatggcgaggaaaactgaaaaaggtggaaaatttagaaatgtccactgtaggacgtggaatatggcaagaaaactgaaaatcatggaaaagaagaaacatccaattgacgacttgaaaaatgactaaatcactaaaaaacgtgaaaaatgagaaatgcccactgaaggacctggaatatggtgagaaaactgaaaatcacggaaaatgagaaatacacactttaggacgtgaaatatggcgaggaaaactgaaaaaggtggaaaatttagaaatgtccactgtaggacgtggaatatggcaagaaaactgaaaatcatggaaaatgagaaacatccacttgacgacttgaaaaatgacgaaatcactaaaaaacgtgaaaaatgagaaatgcacactgaaggacctgtaatatggcgagaaaactgaaaatcacggaaaatgagaaatacacactttaggacgtgaaatatgtcgaggaaaactgaaaaaggtggaaaatttagaaatgtccactgtaggacgtggaatatggcaagaaaactgaaaatcatggaaaatgagaaacatccacttgacgacttgaaaaatgacgaaatcactaaaaaacgtgaaaaatgagaaatgcacactgaaggacctggaaaatggcgagaaaactgaaaatcacggaaaatgagaaatacataatttaggacgtgaaatatggcgaggaaaactggaaaaggtggaaaatttagaaatgtccactgttggacgaggtatatggcaagaaaactgaaaaacatggaaaatgagaaacatccacttgacgacttgaaaaatgacgaaatcactaagaaacgtgaaaatgtgaaatgcacactgaaggacctggaatatggcaagaaaactgaaaatcacggaaaatgagaaatacatactttaggacgtgaaatatggcgagg

SEQ ID NO: 196 - DNA, 1292 bp, mus mus
tacagaactccaaatagactggaccagaaaagaaattcctcccgacacataataatcagaacaacaaatgcactaaataaagatagaatattaaaagcagtaagggagaaaggtcaagtaacatataaaggaaggcctatcagaataacaccagacttttcaccagagactatgaaagccagaagagcctggacagatgttatacagacactaagagaacacaaatgccagcccaggctactatacccggccaaactctcaattaccatagatggagaaaccaaagtattccacgacaaaaccaaattcacacaatatctttccatgaatccagcccaagaaaactgaaaatcatggaaaatgagaaacatccacttgacgacttgaaaaatgacgaaatcactaaaaaacgtgaaaaatgagaaatgcccactgaaggacctggaatatggcgagaaaactgaaaattacggataatgagaaatgcacactttaggacgtgaaatatggcgaggaaaactgaaaaaggtggaaaatttagaaatgtccactgtaggacgtggaatatggcaagaaaactgaaaatcatggaaaatgagaaacatccacttgactacttgaaaaatgacgaaatcactaaaaaacgtgaaaaatgagaaatgcacactgaaggacctggaatatggcgagaaaactgaaaatcacggaaaatgagaaatacacactttaggacgtgaaatatggcgaggaaaactgaaaaaggtggaatatttaggaatgtccactgtaggacgtggaatatggcaagaaaactgaaaatcatggaaaatgagaaacatccacttgacgacttgaaaaatgaagaaatcactgaaaaacgtgaaaaatgaaaatgcacactgtaggacctggaatatggtgagaaaactgaaaatcacggaaaatgagaaatacacactttaggacgtgaaatatggcgaggaaaactgaaaaaggtggaaaatttagaaatgtccactgtaggacgtggaatatggcaagaaaactgaaaatcatggaaaatgagaaacaaccacttgacgacttgaaaaatgacaaaatcactaaaaaacgtgaaaaatgagaaatgcacactgtaggacctggaatatggtgagaaaactgaaaatcacggaaaatgagaaatacacactttaggacatgaaatatggcgaggaatactgaaaaagatggaaaatttagaaatgtccactgtaggacgtggaatatggcaagaaaactgaaaatcatgg

SEQ ID NO: 197 - DNA, 1028 bp, mus mus
gaaatatggcaagaaaactgaaaatcatggaaaatgagaaacatccacttgacgacttaaaaaatgacgaaatcactaaaaaacgtgaaaaatgagaaatgcacactgaaggacctggaatatggcgagaaaactgaaaatcacggaaaatgagaaatacacactttaggacgtgaaatatggcgaggaaaactgaaaaaggtggaaaatttagaaatgtccactgtaggacatggaatatggcaagaaaactgaaaataatggaaaatgagaaaaatccacttgacgacttgaaaaatgacgaaatcactaaaaacgtgaaaaatgagaaatgcccactgaaggacctggaatatggcgagaaaactgaaaatcacggaaaatgagaagtacacactttaggacgtgaaatatggcgaggaaaactgaaaaaagtggaaaatttagaaatgtccactgtaggacgtggaatatggcaagaacactaaaaatcatggaaaatgagaaacatccacttgacgagttgaaaaatgacgaaatcactaaaaaacgtgaaaaatgagaaatgcacactgaaggacctggaatatggcgagaaaactgaaaatcgcgaaaaatgagaaatacacactttaggacgtgaaatatggcgaggaaaactgaaaaaggtggaaaatttagaaatatccactgtaggacgtggaatatggcaagaatactgaaaatcatggaaaatgagaaacatccacttgacgacttgaaaaatgacgaaatcactaaaaaacatgaaaaatgagaaatgcacactgaaggacctggaatatggcgagaaaactgaaaatcacggaaaatgagaaatacacacaataggacgtgaaatatggcgaggaaacctgaaatggtggaaaatttagaaatgttcactgtaagacgtggaatacggcaagaaaaccgaaaatcatggaaaatgagaaacatccacttgacgacttgaaaaatgacgaaatcactaaaaaaagtgaaaaacg

SEQ ID NO: 198 - DNA, 573 bp, mus mus
tggcggggaaaactgaaaaaggtggaaaatttagaaatgtccactgtaggacatggaatatggcaataaaactgaaaatcatggaaaatgagaaacatccactcgacgacttgaaaaatgacgaaatcactaaaaaacgtgaaaaatgagaaatgcccactgaaggacctggaatatggcgagaaaactggaaattacggaaaatgagaaatacacactttaggacgtgaaatatggcgaggaaaactgaaaacggtggaaaatttagaaatgtccactgtaggacttggaatatggcaaaaaatctgaaaatcatggaaaatgagaaaaatccccttgacgacttgaaaaatgacgaaatccctcaaaaacgtgaaaaatgtgaaatgcccactgaaggacctggaatatggcgagaaaactgaaaatcacggaaaatgagaaatacacactttaggacgtgaaatatgtcgaggaaaactgaaaaaggtggaaaatttagaaatttccactgtaggacgtggaatatgacaagaaaactgaaaatcatggaaaatgagaaacatccacttg

SEQ ID NO: 199 - DNA, 1265 bp, mus mus
gactttcacttgacgacttgaaaaatgacgaaatcactaaaatacgtgaaaaatgagaaatgcacactgaaggacacggaatatggcgagaaaactgaaaatcacggaaaatgagaaatacacactttaggacgtgaaatatgctgaggaaaactgaataaggggaaaatttagaaatgtccactgtaggacgtggaatatggcaagaaaactgggaatcatggaaaatgagatacatccacttgacgacttgaaaaatgacgaaatcactaaaaaacgtgaaaaatgagaagtgcacactaaaggacctggaatatggcgagaaaactgaaaatcacggaaaatgagaaatacacacttcaggacgtgaaatatgtcgaggaaaactgaaaaaggtgaaaaatttagaaatgtccactgtaggacgtggaatatggcaagaaaactgaaaatcatggacaatgagaaagatccacttgacgacttgaaaaatgacgaaatcactaaaaaacttgaaaaatgagaaatgcacactgaaggacctgtaatatggcgagaaaacggaaaatcacggaaaatgagacatacacactttaggacgtgaaatatggcgaggaaaactgaaaaaggtggaaaatttagaaatgtccactgtaggacgtggaatatggcaagaaaactgaaaatcatggaaaatgagaaacatccacttgacgacttgaaaaatgacgaaatcactaaaaaacttgaaaaatgagaaatgcacactgaaggacctgtaatatggcgagaaaacgaaaaatcacggaaaatgagaaatacacactttaggacgtgaaatatggcgaggaaaactgaaaaagttggaaaatttagaaatgtccactgtaggacgtggaatatggcaagaaaactgaaaatcatggaaaatgagaaacatccaattgacgacttgaaaaatgacgaaatcactaaaaaacttaaaaaatgagaaatgcacactgaaggacctggaatatggcgagaaactgaaatacacggaaaatgagaaatacacactttaggacgtgaaatatggcgaggaaaactgaaaaaggtggaaaatttagaaatgtccactgtaggacatggaatatggcaagaaaactgaaaatcatggaaaatgagaaacatctacttgacgatttgaaaaatgacgaaatcactaaaaaacgtgaaaaatgagaaatgcccaatgaaggacttggaatatggcgagaaaactg

SEQ ID NO: 200 - DNA, 2025 bp, mus mus
  misc_feature (1513)..(1513): n is a, c, g, or t
ctctctaaatgagaaatacacactttaggacgtgaaatatggcgaggaaaactgaaaaaggtggaaaatttagaaatgtccactgtaggacgtggaatatggcaagataactgaacatcatggaaaatgagaaacatccacttgacgacttgaaaaatgacgaattcactaaaatacgtgaaaaaagagaaatgcacactgaaggacctggaatatggcgagaaaacggaaaatcacgaaaaatgagaaatatacactttaggacgtgaaatgaggtgaggaaaactgcaaaaggtggaaaatttagaaatgtccactgtaggacgtggaatatggcaagaaaactgaaaatcatggaaaatgagaaacatccacttgacgacttgaaaaatgacgaaatcactaaaaaacgtgaaaaatgagaaatgcccactgaaggacctggaatatggcgagaaaactgaaaatcacggaaaatgagaaatacacactttaggatgtgaaatatggcgaggaaaactgaaaaaggtggaaaatttagaaatgtccactgtaggacgtcggatatggcaagaaaactgaaaatcatggaaaatgagagacatccacttgacgacttggaaaatgacgaaatcactagaatacgtgaaaaatgagaaatgcacactgaaggacctggaatatggcgagaaaactgaaaatcacggaaaatgagaaatacacactgtaggacgtgaaatatggcgagggaaagctgaaaaaggcggaaaatttagaaatgtccactgtaggacgtggaatatggcaagaaaactgaaaatcatggaaaatgagaaaaattcacttgacgacttgaaaaatgacgaaatcactaaaaaacgtgtaaaatgagaaatgcacactgaaggacctggaatatggcgagaaaactgaaaatcacggaaaatgagaaatacacactttaggacgtgaaatatggcgaggaaaactgaaaaaggtggaaaatttagaaatgtccactgtaggacgtggaatatggcaagaaaactgaacatcatggaaaatgagaaacatccaattgacgacttgaaaaatgacgaattcactaaaatacgtgaaaaaagagaaatgcacactgaaggacctggaatatggcgagaaaactgaaaatcacggaaaatgagaaatatacactttaggacgtgaaatgaggtgaggaaaactgaaaaaggtggaaaatttagaaatgtccactgtaggacgtggaatatggcaagaaaactgaaaatcatggaaaatgagaaacatccacttgacgacttgaaaaatgacgaaatcactaaaaaacgtgaaaaatgagaaatgcccactgaaggacctggaatatggcgagaaaactgaaaatcacggaaaatgagaaatacacactttaggatgtgaaatatggcgaggaaaactgaaaaaggtggaaaatttagaaatgtcccctgtaggacgtggaatatggcaaganaactgaaaatcatggaaaatgagaaacatccacttgacgacttgaaaaatgacgaaatcactaaaaaacgtgaaaaatgagaaatgcccactgaaggacctggaatatggcgagaaaactgaaaatcacggaaaatgagaaatacacactttaggatgtgaaatatggcgaggaaaactgaaaaagttggaaaatttagaaatgtccactgtaggacgtggaatatggcaagaaaactggaaatcatggaaaatgagaaacatccacttgacgacttgaaaaatgacgaaatcactaaaaaacgtgaaaaatgagaaatgcccactgaaggatctggaatatggtgagaaaactgaaaattacggaaaatgagaaatacacactttaggacgtgaaatatggcgaggaaaactgaaaaaggtggaaaatttagaaatgtccactgtaggacgtggaatatggcaagaaaactgaaaatcatggaaaatgagaaacatccacttgacaacttg

SEQ ID NO: 201 - DNA, 1112 bp, Mus Mus
ggcgtgaaatatggcgaggaaaactgaaaaaggtggaaaatttagaaatgtccactgtaggacgtggaatatggcaagaaaactgaaaatcatggaaaatgagaaacatccacttgacgacttgaaaaatgacgaaatcactaaaaaacgtgaaaaatgagaaatgcacactgaaggacctggaatatggcgagaaaactgaaaatcacggaaaatgagaaatacacactttaggacgtgaaatatgtcgaggaaaactgaaaaaggtggaaaatttagaaatgtccactgtaggacgtggaatatggcaagaaaactgataatcatggaaaatgagaaacatccacttgacgacttgaaaaatgacgaaatcactaaaaaacctgaaaaatgagaaatgcacactgaaggacctggaatatggcgagaaaaatgaaaatcacggagaatgagaaatacacactttaggacgtgaaatatgtcgaggaaaactgaaaaaggtggaaaatttagaaatgtccactgtaggacgtggaatatggcaagaaaacttaaaatcatggaaaatgagaaacatccacttgaagatttgaaaaatgacgaaatcactaaaaaacgtgaaaaatgagaaatgcacactgaaggacctggaatatggcgagaaaactgaaaatcatggaaaatgagaaatacacactttaggacgtgaaatatggagaggaaaactgaaaaaggtggaaaatttagaaatgtccactctaggacgtggaatatggcaagaaaactgaaaatcatggaaaatgagaaacatccacttgacgacttgaataatgacgaaatcactaaaaaacgtgaaaaatttgaaatgcacactcagggacctggaatatggcgagaaaactgaaaatcacggaaaatgagaaatacatactttaggacgtgaaatatggcgaggaaaactgaaaaaggtggaaaatttagaaatgtccactgtaggacgtggaatatggcaagaaaactgaaaatcatggaaaatgagaaacatccacttgacgacttgaaaaatgacgaaatcactaaaaaacgtgaaaatgagaaatgcacactgaagg

SEQ ID NO: 202 - DNA, 1121 bp, mus mus
ctctctcatggaaaaagagaaacatccacttcacgacatgaaaaatgacaaaatcactgaaaaacgtgaaaaatgagaaatgcacattgtaggacctggaatatggcgagaaaactgaaaatcacggaaaatgagaaatacacactttaggacgtgaaatatggcgaggaaaactgaaaaaggtggaaaatttagaaatgtccactgtaggacgtggaatatggcaagaaaactgaaaatcatggaaaatgagaaacatccacgtgacgacttgaaaaatgacgaaatcactgaaaaacgtgaaaaatgagaaatgcacactgaaggacctggagtatggtgagaaaactgaaaatcacggaaaatgagaaatacacaatttaggacgtgaaatattgcgaggaaaactgaaaaaagtggaaaatttagaaatgtccactgtaggacatggaatatggcaagaaaactgaaaatcatggaaaatgagaaacatccacttgacgacctgaaaaatgaagaaatcactgaaaaacgtgaaaaatgagaatgcacactgtaggatctggtatatggcgagaaaactgaaaatctcggaaaattagaaatacacactttaggacgtgaaatattgcaagggaaactgaaaagggtggaaaatttaggaatgtccactgtaggacatggaatacggcaagaaaactgaaaatcatggaaaatgagaaacatccacttgacgacttgaaaaatgacgaaatcactgaaaaacgtgaaaaatgttaaatgcacactgtaggacctggaatataacgagaaaactgaaaatcacggaaaatgagaaatacacactttaggacgtgaaatatggtgaggaaaactgaaaaaagttgaaaatttagaaatgtccactgtaggacatggaatatgacaagaaaagtgaaaatcatgaaaaatgagaaacatccacttgacgacttgaaaaatgacgaaatcactgaaaaacgtgaaaaatgggaaatgcacactgtaggacctggaggatggcgagaaaactgaaaattccggaaaatgagtaatacccactttagtacgtgaaatatttcgaggaaaactgaaaaagttgg

SEQ ID NO: 203 - DNA, 1028 bp, mus mus; identical to SEQ ID NO: 197

SEQ ID NO: 204 - DNA, 3887 bp, mus mus
gtggaaataacacacaatcccggaaacttttgttcacatccctgctgagttatttgtcataatacatttagttgtatctggacaagatctatgagttgattaaccagcatgagacctctctgtactgggccaaataagttcatttgctcattaatggctctgaggtcatggagcagtctccactttcctgactttttcttaattacaaaaattggagtattccaaggtgaggtagagggttcaatatggcctagttttaattgttcctctaccagttgaatcacagcttctagtttttcagaggataggtgccattgagggacccacactgggtcccctgttttccatggtatgggtcgtgctgccccaatggccgctaaggaaaacccagaccctgtctgtcttggtttccattaggtaagatgggctctttccttccctgttcttgatgtcctaacccttttccttctttataacccatctttgccatgatattttttgctttagctgaataccctcctgatggggcgttttcattggacaaaataaggcccaaatgctgcataatatcccttccccagaggttaaccgggagtgggagcacataaggtatgaatttcccttgctgcccttcagaggattcccacgtcaaggcaatggagcttatagtgggacatgattgatatcctaggccctgtaatgaatgagatgactctgtggtgggccatgctttgggccaccaatgtgtagagattatacttttatctgctccggtatcaaggatgccttcaaactcttttccgttgatcttaaggcggagcttaggtctatcatttaaagatacaaccaaataggcagaatcatttcctgaggagcccattttctttatctcaggtcctgcagatttctccctggtattatcagggaggagcagcagctgagctatcctatctcctttactaatagaaaaaacgcccttagggcttgagcacaggacctgtatttcaggggaatgttgacaatccataactccagggtggactactaagccctgcaaggtgagtgaacctcggccgagaataaggcccatggttcccgggggcaaggatggtataggctccaccggcaccggctgaatactcatttgaggcattagtaggaagtcggaggcggcacgcaggtccacccttgtgggtcttcctgggtcgcctctctgactgcttcctgggtcctgacaaaccggttcccatatctttgagggccctgggaccgagggcccgatgacccgttttttggcacatcagttgattgactatcaggtgggggaaggactctgccctttatatccctcacagagcgacactggtcagctctatgataacccttgccacacttagagcaaagagtgagagtccctccctgtttatctggagctctgcaacctttcttaaaatgcccaggctttccgcaattaaaacatgtcctctgatcatttctgctcatggagcggttctgagattggaggatggcggccgctaagcctgcattggtgagaggtcccccaagctctcgacagaccctgagccagtcttgtaagcctttgttctttcttggggctatggccgctcggcactcctttgtggcttgctcatagattagctgttctatcagaggcgcagcttgctctgactctccaaaaatacgctctgctgcctctgtcattctggccacaaaatctgagaaggattcctgaggtccctggattatctttgttaactgaccagtggtttcacctgctcgagagagcgccttccaggccctaatagccgtggaggaaacttgggcataagctccccaatggtagtttgtttgatcagcagaataagctccctgacccgttaacaagtcaaaagtccaatctctctgctctggagtcaaagcagctgcgtttgctcgggcctgcgcttgtgcagcttcgtgccaaagcgctctccattccatatatttgcccatactagggagagcggcttttacaaccgtttgccagtcggcaggagttagtgccatgccagcgagcctgtctaactgcaccaaggtaaaattagcattggttccgtatttacgaaccgactcggcaatttccttaatttgtaagtattctaccggagcgtggacacgcccaccctcggctccttcaaagaccggaaatgcctgttgtattttcctttgttcctctctgggaatgaatgagtctgcgcactgcctctctgcgcactgcctctctgcgcattgctgacgcactacgcaggggcggggactccgcatagggcagaccttgaagccgactgccctgaggccaatcagcaaactggccttcgccagccgcttttggcttttttcttgaccaattagctggctggtaatgggctgcttcttcctcccagtctgtttcctcagaggaggattcttcacctgcttcagagctactaagagctggctccccgagcccatccagcgatgagcacaggctccttttcctagagacctccgctaattgatctttcttcttttccctttttcctctttttcttctaatctctctccaggtattcctacctaaccttaacttttcctcgggttcaagacccttggaaaggcctgtatacttattttgtgtaccatatttcctctttgctcctactctctctccccgctttacttctgatagcttgtcctgaatttcatctagaatcctccctatcttaaccacttgataacatgtgaaaaggaacaaaagggctcctaacaccagaaaaaattcaaggccaaacatattccactttacttctgatagactgtcttgaatttcgttagaaagttcaagatcggacttacctcgtaaagctgtactcactggtactctcgttccccagctgaaaagttctgaattcatacagttgaatccttcttaacagtctgctttacgggaacctttattaccgcgacccgcagttctggttctggaatgagggatcttccttgcgccagtcccgagttttttctcgtcccggaattcggcaccaattgttattagacgcgttctcacgaccggccaggaagaacaccacagaccagaatcttctgcggcaaaactttattgcttacatcttcaggagcaggagtgcaagaagtaagagagcaagaagcaagagagagagaaaacgaaaccccgtccctcttaaggagcattctccttcgcctcggacgtgtcactccctgattggctgcagcccatcggccgagttgacgtcacggggaaggcagagcacaagtagtcataagatacccttggcacatgcgcagattatttgtttaccacttagaacacaggatgtcagcgccatcttgtaacggcgaatgtgggggcggctcccaacacctgtgtatagccgtgtctactgcacgtgaattcttgcctgggggttataattaatccttagacatggaatcatacaccttacaacactgaacctcttcacagtgaaggagatggggatatggggagtggctcctgatcatggctcttctggaactgtcacacagagtcccatcctaaggcatccagccttgtgagatgctggaccagcctttgtacatcagaggaaatgcaaagaatgatgggctattctgtgggctgtatactaagtcagagatcttttagagtacttatccaacaggcaagatacttgagtgtgggagtcaggcatgggaccagaagtagttccagtgaccatcgctcctaacataggggctcacacaccacttagagtgtgttgtgttcccattcctataatcttgagctttggagacatggaattcctcatctc

SEQ ID NO: 205 - DNA, 1533 bp, mus mus
ggttgaacagtgtatatcaatgagttacaatgaaaaacatggaaaatgatgaaaaccacactgtagaacatattagatgagtgagttacactgaaaaacacatacgtttgaaaccggcattgtagaacagtgtatatcaatgagttacaatgagaaacatggaaaatgataaaaaccacactgtagaacatattagatgagtgagttacactgaaaaacacattcgttggaaacgggatttgtagaacagtgtatatcaatgagttacaatgaaaaacatggaaaatgataaaaaccacactgtagaacatattagatgagtgagttacactgaaaaacacattcgttggaaacgggatttgtagaacagtgtatatcaatgagttacaatgaaaaacatggaaaatgataaaaaccacactgtagaacatattagatgagtgagttacactgaaaaacacattcgttggaaaccggcattgtagaacagtgtatatcaatgagttacaatgaaaaatatggaaaatgatgaaaaccacactgtagaacattttagatgagtgagttacactgaaaaacacatacgttggaaaccggcattgtagaacagtgtatatcaatgagttacaatgagaaaaatggaaaatgataaaaaccacagtgtagaacatattagatgtgtgagttacactgaaaaacacattcgttggaaacgggatttgtagaacagtgtatatcaatgagttacaatgaaaaacatggaaaatgataaaaaccacactgtagaacattttagatgagtgagttacaccttgccttcccagcttcgtggtcatcctagaaacaaatagccaaaaaactatggtgaagtccaacaccccgatagctaatgtgagtcacagaaatgggttgcaggtagcccccgaaggcaggccaggtgcaccgaggagttcagtgcaagcaacctcaaagcctgagaaatgactagttaccttgtggggctgcttgtacaaagtgctgtagtgtctggacatcctctggagattgacaggtatctacatactcagccagagccacaagattagtaaggcattctagcaaatagcttcatctctaccctgtgctggaagcacacacggctttcctgcatgaccactggtccacttgaccatcgtgccatgattaagatgggggcacaagacaccgagaagggatagcctggggtctgcagctgaaattaccacctgctgacttctgcaatatataacatttggttagggaactatagtcacatctgacttggctctggatggtaggtgagtttagaatcacggccatccatttgcagagtttagggaataataagggataagcaagagagacccccaggtagctgacaagaggtaaggatatttgctgtcttgctgtttctaggaaaatcctgccttcctctgggtggtatcataaactgaaataaccagtgatagccaaaggctcgtcaacccccacagtaagaggaccaaacccaaggac

SEQ ID NO: 206 - DNA, 143 bp, mus mus
ctctctgtttttcagtgtaactcactcatctaatctgttctacagtgtggtttttatcattttccatgtttctcattgtaactcattgatatacactgttctacaaatcccgtttccaacgaatgtgtttttcagtgtaactc

SEQ ID NO: 207 - DNA, 605 bp, mus mus
gtgaaatatggcgaggaaaactgaaaaaggtggaaaatttagaaatgtccactgtaggacgtgaaatatggcaagaaacccaaaaatcatggaaaatgagaaacatccacttgacgacttgaaaaatgacgaaatcactaaaaaacgtgaaaaatgagaaatgcccactgaaggacctggaatatggcgagaaaactgaaaatcgcggaaaatgagaaatacacactttatgacgtgaaatatggcgaggaaaattgaaaaagttggaatatttagaaatgtccactgtaggacgtgaaatatggcaagaaacccaaaaatcatggaaaatgagaaacatccacttgacgacttgaaaaatgacgaaatcactaaaaaacgtgagaaatgagaagtgcacactgaaggacctggaatatggcgagaaaactgaaaatcacggaaaatgtgaaatacacactttaggacgtgtaatattgcgaggaaatctgaaaaagttggaatatttagaaatgtccactgtaggacgtgaaatatggcaagaaacccaaaaatcatggaaaatgaaaaacatccactggacgacttgaaaaatgacgaaatcg

SEQ ID NO: 208 - DNA, 1149 bp, mus mus
ctctctgacatttataaattttccacctttttcagttttcctcgccatatttcacgtcctaaactgtgtatttctcattttccgtgattttaagttttctcgccatattccaggtccttcagtgtgcatttctcatttttcacgttttttagtgatttcgtaatttttcaagtcgtcaagtggatgtttctcattttccatgattttcagttttcttgccatattccatgtcctacagtggacatttctaaattttccacctttttcagttttcctcgccatatttcaagtcctaaagtgtgtatttctcattttccgtgattttcagttttctcgccatattccaggtccttcagtgtgcatttctcatttttcacgttttttagtgatttcgtaatttttcaagtcgtcaagtggatgtttctcattttccatgattttcagttttcttgccatattccacgtcctagagtggacatatataaattttccacctttttcaattttcctcaccatatttcacgtcctaaagtgtgtatttctcattttccgtgattttcagttttctcgccatattccaggtccttcagtgtgcatttctcatttttcacgtattttagtgatttcgtcatttttcaagtcgtcaagtggatgtttctcattttccatgattttcagttatcttgccattttccacgtcctacagtggacatttctaaaatttccacttttttcggttttcctcgccatatttcacgtcctaaagtgtgtatttctcattttccgttattttcagttttcttgccatattccaggtccttcagtgtgcatttctcatttttcacgttttttactgatttcgtcatttttcaaggcgtcaagtggatgtttctcattttccatgattttcagttttcttgccatattccacgtcctagagtggacatttataaattttccacctttttcagttttcctcgccatatttcacgtcctaaaatgtgtatttctcattttccgtgattttaagttttctcgccatattccaggtctttcagtgtgcatttctcatttttcacgtattttagtgatttcgtcatttttcaagtcgtcaagtggatgtttctcattttccatgattgtcagttt

SEQ ID NO: 209 - DNA, 1002 bp, mus mus
gtgttatacactgttctacaaatcccgtttccatcgaatgtgtttttcagtgtaactcacacatctaatatgttctacactgtggtttttatcattttccatttttctcattgtaactcattgatatacactgttctacaatgccggtttccaacgaatgtgtttttcagtgtaactcactcatctaatatgttttacagtgtggtttttatcattttccatgtttttcattgtaactcattgatatacactgttctacaaatcccgtttccaacgaatgtgtttttcagtgtaactcactcatctaatatgttctacagtgtggtttttatcattttccatgtttttcattgtaactcattgatatacactgttctacaatgccggtttccaaccaatgtgtttttcagtgtaactcactcatctaatctgttctacagtgtggtttttatcattttccatgtttctcattgtaactcattgatatacactgttctacaaatcccgtttccaaccaatgtgtttttcagtgtaactcactcatctaatctgttctacagtgtggtttttatcattttccatgtttctcattgtaactcattgatatacactgttctacaaatcccgtttccaacgaatgtgtttttcagtgtaactcactcatctaatctgttctacagtgtggtttttatcattttccatgtttctcattgtaactcattgatatacactgttctacaaatcccgtttccaacgaatgtgtttttcagtgtaactcactcatctaatctgttctacagtgtggtttttatcattttccatgtttctcattgtaactcattgatatacactgttctacaaatcccgtttccaacgaatgtgtttttcagtgtaactcactcatctaatctgttctacagtgtggtttttatcattttccatgtttctcattgtaactcattgatatacactgttctacaaatcccgtttccaaccaatgtg

SEQ ID NO: 210 - DNA, 1344 bp, mus mus
ggggaggaaaatttagaaatgtccactttaggacatggaatacggcaagaaaactgaaaatcatggaaaatgagaaacatccacgtgacaacttgaaaaatgacgaaatcactgcaaaacgtgaaaaatgagaaatgcacactgtaggaactggaatatggcgagaaaactgaaaatcacggaaaatgagaaatacacactttaggacgtgaaatatggcgaggaaaactgaaaaaggtgggaatttagaaatgtacactgtaggacatggaatatggcaagaaaactgaaaatcatggaaaatgagaaacatccacttgaccacttgaaaaatgaggaaatcacagaaaaacgtgaaaaatgagaaatgcacactgtaggacctggaatatggcgataaaactgaaaatcacggaaaatgagaataacactagttaggtagtgaaattgatgagaaatattgaaaaatatgaaaaatgagaaatgcacactaggacctagaatatggaaataaaactgaaaatcacggaaaatgagaaatacacactttaggaggtgaaatatggcgaggaaaactgaaaaaggcggaaaatttagaaatgtcccctgaatgatatggaatatggcaagaaaactgaaaatcatggaaaatgagaaacatccacgtgacgtcttgaaaaatgatgaaatcactgaaaaacgtgaaaaatgagaaatgcacactgtaggacttggattatggcgagataactgaaaataatggaaaatgaaaatacacactttaggaagtgaaataaggcgaggaaaactgaaaaagttgcataatttagaaatgtccactgtaggacatggaatatggcaagaaaactgaaaatcatggaaaatgagaaacatccacttgaccacttgaaaaatgatgaaatcactgccaaaagtgaaaaatgagaaatgcacactgtaggaactgaaatatggcgagaaaactgaaaatcacggaaaatgagaaatacacactttaggacgtgaaatatggcgaggaaaactgaaaaaggtggaaaatttagaaatgtccactgtacgacaaggaatatggcaagaaaaccgaaaatcatggaaaatgagaaacatccacttgaccacttgaatgatgatcaaatcacttaaaaacgtcaaaaatgagaaatgcacactgtaggacctggaatatggcaagaaaactgaaaatcatggaaaacgagaataacactagttaggtagtgaaattgacgagaaatttaaaaaaatatgaaaaatgagaaatgcacactaggacctaaaatatggagagaaaaatgaaaatcacgg

SEQ ID NO: 211 - DNA, 908 bp, mus mus
tttctcatttttcacgttttttagtgatttcgtcattttttaagtcgtcaagtggatgtttctcattttccatgattttcagttttcttgccatatttctcgtcctaaagtggacatttctaaatattcaactttttcagttttcctcgccatatttcacgtcctaaagtgtgtatttctcattttccgtgattttcagttttctcgccatattccaggtccttcagtgtgcatttcttatttttcacgttttttagtgatttcgtcatttttcaagtcgtcaagtggatgtttctcattttccataattttcagttttcttgtcatatttcacatcctacagtggacaattctaaattttccacctttttcagttttcctcgccatatttcacgtcctaaagtgtgtatttctcattttccgtgattttcggttttctcgccatattccaggtcctacagtgtgcatttctcatttttcacgtttttcagtgatttcgtcattttacaagtggtcaagtggaattttctcattttccatgattttcagttttcttgccatattccatgtcctacattgacatttctaaattttccacttttttcagttttcctcgccatatttcatgtcctaaagtgtgtatttctcattttccgtgattttcagtttcctttcaataatccaggtcctacagtgtgcatttctcattttccacgtttttcagtgattttgtcatttttcaagtcgtcatgtagatgtttctcattttccatgatttttagattcttgccatattccatgtcctacagtggacatttctaaattttccacctttttcagttttcctcgccatatttcacgtcctaaattgtgtatttctcattttcgtgattttcagctttctcgcc

SEQ ID NO: 212 - DNA, 2228 bp, mus mus
ctctctggaaaatgagaaatacacactttaggacatcaaatatggtgaggaaaattgaaaaaggtggaaaatttagaaatgtccactgtaggacgtggaatatggcaagaaagctgaaaatcatggaaaatgagaaacatacaattgacgacttgaaaaatgacgaaatcactaataaacgtgaaaaatgagaaatgcacgctgaaggacatggaatatggcgagaaaagtgaaaatcacgaaaaatgagaaatacacactttaggacgtgaaatatggcgaggaaaactgaaaaaggtgaaaaatttagaaatgtccactgtaggacgtggaatatggcaagaaaactgaaaatcatggaaaatgagaaacatccacttgacgacttgaaaaatgacgaaatcactaaaaaacgtgaaaaatgagaaatgcacactgaaggacctggaatatggtgagaaaactgaaaatcacggaaaatgagaaatacacactttaggacatcaaatatggtgaggaaaactgaaaaaggtggaaaatttagaaatgtccactgtaggacgtggaatatggcaagaaagctgaaaatcatggaaaatgagaaacatccacttgacgactagaaaaatgacgaaatcactaaaagacgtgaaaaattagaaatgcccagctgaagaacctggaatatggcgagaaaactgaaaatcacggaaaatgagaaatacacactttaggacgtgaaatatggcgaggaaaacttaaaaaggtggaaaatttagaaatgtccactgtagtacgtggaatatggcaagaaaattgagaaaatcatggaaaatgagaaacatccacttgacgacttgaaaaatgacgaaatccctaaaaagcgtgaaaaatgaaaaatgcacactgagggacctggaatatggcgagaaaactgaaaatcacggaaaatgagaaatacacactttaggacgttaaatatggcgaggaaaacttaaaaaggtggaaaatttagaaatgtccactgtagtacgtggaatatggcaagaaaactgaaaatcatggaaaatgagaaacatccacttgacgacttggaaacgacgaaatcactgaaaaacgtgaaaaatgcgaaatgcacactgaaggacctggaatatggcgagaaaactgaaaatcacggaaaatgagaaatacacactttaggacatcaaatatggtgagggaaatttgaaaaagggtggaaaatttaggaatgtccactgtagggacggtggaataaggcaagaaaactgaaaatcatggaaaatgagaaacatccacttgacgacttgaaaaatgacgaaatcactaaaatacgtgaaaaatgagaaatgcacactgaaggacctggaatatggcgagaaaactgaaaatcacggaaaatgagaaatacacactttaggacgtgaaatatggcgaggaagactgaaaaaggtggaatatttagaaatgtccactgtaggacgtggaatatggcaagaaagctgaaaatcatggaaaatgagaaaaatccacttgacgacttgaaaaatgacgaaaccactaaaagacgtgaaaaatgagaaatgcccactgaaggacctggaatatggcgagaaaactgaaaatcacggaaaatgtgaattacaaactttaggacgtgaaatatggcgaggaaaactgaaaaaggtggaaaatttagaaatgtccactgtaggacgtggaatatggcaagaaaagtgaaaatcatggaaaatgagaaacatccacttgacgacttgaaaaatgacgaaatcagtaaaatacgtgaaaaatgtgaaatgcacactgaaggacctgtaatatggcggaaaactgaaaatcacggataatgagaaaaacacactttaggacgtgaaatatggcgcggaaaaatgaaaaaggtggaaaatttagaaatgtccactgtaggacgtggaatatggcaagaaaactgaaaatcatggaaaatgagaaacatccacttgacgacttgaaaaatgacgaaatcagtgaaaaacctgaaaaatgaaaaatgcaaaccttacaacctggaatatggcgaggaaactgaaaaatcacagaaaaagagaaatacaaactttaggacgtgaaatatggcgagaaaaactgaaaaaggtggaaaatttagaaatgtccactgtaggacgtggaatatggcaagaaaactg

SEQ ID NO: 213 - DNA, 822 bp, mus mus
ggcaagaaaactgaaaatcatggaaaaagagaaacatccacttgaggacttgaaaaatgacgaaatcactgaaaaacttgaaaaatgagaaatgcacactgtaggacctggaatatggcgagaaaactgaaaatcacggaaaatgagacatgcacactttaggacctgaaatatggcgaggaaaactgaagaaggttgaaaatttagtaatgtccactgtaggacgtggaatatggcaagaaaactgaaaatcatggcaaatgagaaacatccacttcacaacttgaaaaatgacgaaatcactgacaaacgtgaaaaatgagaaatgcacactgtaggacctggaatatggcgagaaaactgaaaatcacggaaaatgagaaatacacactttaggatgtgaaatatggcgaggaaaactgaaaaaagtggaaaatttagaaatgtccactgtaggacgtggaatatggcaagaaaactgaaaatcatggaaaatgggaaacttccacttgacgacttgaaaaatgacgaaatcactgaaaaacatgaaaaatgtgaaatgcacacagaaggacctggaatatggcgagaaaactgaaaatcacggaaaatgagaaatacacactttaggacgtgaaatatggcgaggaaaactgaaaaagttggataatttagaaatgtccactgtaggacgtggaatatggcaaaaaaactgaaaatcatggataacgagaaacatccacttgacgaattgaaaaatgacgaaatcactgaaaaacgtgaaaaatgagaaatgtacactggaggacctcgaatatggcg

SEQ ID NO: 214 - DNA, 961 bp, mus mus
ctctctgacttgaaaaatgacgaaatcactaaaatatgtgaaaaatgagaaatgcacactgaaggacctggaatatggcgagaaaactgaaaatcacggaaaatgagaaatacacactttaggacgtgaaatatggcgaggaaaactgaaaaaggtggaaaatttagaaatgtccactgtaggacgtggaatatggcaagaaaactgaaaatcatggaaaatgagaaacatccacttgaagacttgaaaagtgacgaaatcactaaaattcgtgaaaaatgagaaatgcccactgaaagacctggaatattgcgagaaaactgaaaatcacggaaaatgagaaatacacactttaagacgtgaaatatggcgaggaaaacttaaaaaggtggaatatttagaaatgtcctctgtaggacgtgaaatatggcaagaaaactgaaaatcatggaaaatgagaaacatccacttgacgacttgaaaaatgaggaaatcactatataacgtgaaaaatgagaaatgcgcactgaaggtcctggaatatggcaagaaaattgaaaatcacggaaaatgagaaatacacactttaggcgtgaaatatggcgaggaaaactgaaaaaggtggaaaatttaaaaatatccactgtaggacgtggaatatgtcaagaaaactgaaaatcatgaaaaatgagaaacatccacttgacgacttgaaaaatgaggaaatcactatataacgtgaaaaatgagaaatgcgcactgaaggtcctggaatatggcaagaaaattgaaaatcacggaaaatgagaaatacacactttaggcgtgaaatatggcgaggaaaactgaaaaaggtggaaaatttaaaaatgtccactgtaggacgtgaaatatggcaagaaaactgaaaatcatggaaaatgagaaacatccacttgaagacttgaaaaatgacgaaatc

SEQ ID NO: 215 - DNA, 1174 bp, mus mus
ctctctctgaaaaaggtggaaaatttagaaatgtccactgtaggacgtggaatatggcaagaaaactgaaagtcatggaaaatgagaaacatccacttgaggatttgaaaaatgacgaaatcactaaaaaacgtgaaaaatgagaaatgcacactgaaggacctggaatatggcgagaaaactgaaaatcatggaaaatgagaaacatccacttgaggacttgaaaaatgacgaaatcactaaaatacgtgaaaaatgagatatgcacactgaaaaacctggaatatggcgagaaaactgaaaatcacggaaaatgagaaatacacactttaggacgtgaaatatggcgaggaatactgaaaaaggtggaaaatttagaaatgtccactgtaggacgaggaatatggcaagaaaactgaaaatcatggaaaatgagaaatatccacatgacgacttgaaaaatgacgaaatcactaaaatacgtgaaaaatgagaaatgcacactgaaaaacctggaatatggcgagaaaactgaaaatcacggaaaatgagaaatacacactttaggacgtgaaatgaggcgaggaaaactgaaaaaggtggaaaatttagaaatgtcccctgtaggacgtggaatatggcaagaaaactgaaaatcatggaaaatgagaaaaattcacttgacgacttgaaaaatgacgaaatcactaaaaaacatgaaaaaagagaaatgcccaatgaaggacctggaatatggcgagaaaactgaaaatcacggaaaatgagaaatacacactttaggaagtgaaatatggcttaaaaactgaaaaaggtggaaaatttagaaatgtccattgtaggacgtggaatatggcaagaaaactgaaaatcatggaaaatgagaaacatccacttgacaacttgaaaaatgacgaaatcactaaaaaacgtgaaaaatgagaaatgcccactgaaggacctggaatatggcgagaaaactgaaaatcacggaaaatgagaaatactcactttaggacgtgaaatatggcaaggaaaaactgaaaaaggtgtataatttagaaatttccactgtaggacgaggaatatggcaagaaaactgaaaatcatggaaaaggagaaacatccacttgacgaattgaaaaacgacgaaatc

SEQ ID NO: 216 - DNA, 961 bp, mus mus
ctctctgacttgaaaaatgacgaaatcactaaaatatgtgaaaaatgagaaatgcacactgaaggacctggaatatggcgagaaaactgaaaatcacggaaaatgagaaatacacactttaggacgtgaaatatggcgaggaaaactgaaaaaggtggaaaatttagaaatgtccactgtaggacgtggaatatggcaagaaaactgaaaatcatggaaaatgagaaacatccacttgaagacttgaaaagtgacgaaatcactaaaattcgtgaaaaatgagaaatgcccactgaaagacctggaatattgcgagaaaactgaagatcacggaaaatgagaaatacacactttaagacgtgaaatatggcgaggaaaacttaaaaaggtggaatatttagaaatgtcctctgtaggacgtgaaatatggcaagaaaactgaaaatcatggaaaatgagaaacatccacttgacgacttgaaaaatgaggaaatcactatataacgtgaaaaatgagaaatgcgcactgaaggtcctggaatatggcaagaaaattgaaaatcacggaaaatgagaaatacacactttaggcgtgaaatatggcgaggaaaactgaaaaaggtggaaaatttaaaaatatccactgtaggacgtggaatatgtcaagaaaactgaaaatcatgaaaaatgagaaacatccacttgacgacttgaaaaatgaggaaatcactatataacgtgaaaaatgagaaatgcgcactgaaggtcctggaatatggcaagaaaattgaaaatcacggaaaatgagaaatacacactttaggcgtgaaatatggcgaggaaaactgaaaaaggtggaaaatttaaaaatgtccactgtaggacgtgaaatatggcaagaaaactgaaaatcatggaaaatgagaaacatccacttgaagacttgaaaaatgacgaaatc

SEQ ID NO: 217 - DNA, 641 bp, mus mus
ctctctgaaaatcatggaaaatgagaaacatccacttgacgacttgaaaaatgacgaaatcactaaaaaacgtgaaaaatgagaaatgcacactgaaggacctggaatatggcgagataactgaaaatcacgaaaaatgagaaatacacactttaggacgtgaaatatggcgaggaaaacagaaaaaggtggaaaatttagaaatgtccactctaggacgtggaatatggcaagaaaactgaaaatcatggaaaatgagaaacatccacttgacgacttgaaaaatgacgaaataactaaaaaacgtgaaaaatgagaaatgcccactgaaggacctggaatatggggagaaaactgaaaatcacggaaaatgaaaaatacacactttaggacgtgaaatatggcgaggaaaactgaaaaaggtggaaaatttagaaatgtccactgtaggacgtggaatatggcaagaaaactgaaaatcatggaaaatgagaaacatccacttgacgacttgaaaaatgacgaaatcactaaaaaacgtgaaaaatgagatatgcacactgaaggacctggaatatggcgaggaaaattgaaaaaggtggaaaatttagaaatgtccactgtaggacgtggaatatgtc

SEQ ID NO: 218 - DNA, 1904 bp, mus mus
ctctctctctcctctcttgcttgcttttctctctctcttgcttcttgctctcttttcctgaagatgtaagaataaagctttgccgcagaagattctggtctgtggtgttcttcctggccggtcgtgagaacgcgtcgaataacaattggtgccgaattccgggacgagaaaatccgggacgagaaaaaactccggactggcgcaggagggatacttcattccagaaccagaactgcgaatcaaggttataaggttcccgtaacacagactgttgagaaggattcaactgccgaattcagaactcatcagctggggaacgacggtgataaaggttcccgtaaagcagactgttaagaaggattcaactgtatgaattcagaacttttcagctggggaacgagagtaccaaatgaagacaacccattttgggtaccagaaagactcacccgaaaaatccagactgaccaagggaatactaatgtccctcgtcttggtgatgtccagggcgtcaataataaagagagagcagcgttgggggataatgtcgacatttccactcccaatgacggtgatgtataatgctcaagtattctcctgcttttttaccactaactaggaactgggtttagccttgattcagacagccttggctctgtctggacaggtccagatgactgacaccattaacactttgtcagcctcagtgactacagtcatagataaacaggcctcagctaatgtcaagatacagggaggtctcatgctggttaatcaactcatagatcttgtccagatacaactagatgtattatgacaaataactcagcagggatgtgaacaaaagtttccgggattgtgtgttatttccattcagtatgttaaatttactagggcagctaatttgtcaaaaagtctttttcagtatatgttacagaattggatggctgaaattgaacagacccttcgaggcttgccatcattcaggtcaactccacgcgcttggacctgtccctgaccaaaggattacccaattggatctcctcagcattttctttctttaaaaaatgggtgggattaatattatttggagatacactttgctgtggattagtgttgcttctttgattggtctgtaagcttaaggcctaaactaggagagacaaggtggttattgcccaggcgcttgcaggactagaacatggagctccccctgatatatggttatctatgcttaggcaataggtcgctggccactcagctcttatatcccatgaggctagactcattgcacggggtagagtgagtgtgcttcagcagcccgagagagttgcaaggctaagcactgcaatggaaaggctctgcggcatatatgagcctattctagggagacatgtcatctttcatgaaggttcagtgtcctagttcccttcccccaggcaaaacgacacgggagcaggtcagggttgctctgggtaaaagcctgtaagcctaagagctaatcctgtacatggctcctttacctacacactggggatttgacctctatctccactctcattaatatgggtggcctatttgctcttattaaaagaaaaagggggagatgttgggagccgcccccacattcgccgttacaagatggcgctgacatcctgtgttctaagtggtaaacaaataatctgcgcatgtgccaagggtatcttatgactacttgtgctctgccttccccgtgacgtcaactcggccgatgggctgcagccaatcaaggagggacacgtccgaggcgaaggagaatgctccttaagagggacggggtttcgttctctctcctctcttgcttgcttttctctctctcttgcttcttgctctcttttcctgaagatgtaagaataaagctttgccgc

SEQ ID NO: 219 - DNA, 1798 bp, mus mus
ggggggtttcgttttctctcgctcttgcttcttgctctcttgcttcttgctctcttgcttcctgcaccctggctcctgaagatgtaagaaataaagctttgccgcagaagattctggtctgtggtgttcttcctggccggtcgtgagaacgcgtctaataacaattggtgccgaattccgggacgagaaaaaactcgggactggcgcaaggaagatccctcattccagaaccagaactgcgggtcgcggtaataaaggttcccgtaaagcagactgttaagaaggattcaactgtatgaattcagaacttttcagctggggaacgagagtaccagtgagtacagctttacgaggtaagtctgatcttgaactttctaaggaaattcaagacagtctatcagaagtaaagtggaatatgtttggccttgaattttttctggtgttaggagcccttttgttccttttcacatgttatcaagtggttaagatagggcggattctagatgaaattcaggacaagctatcagaagtaaagtggggagagagagtaggaacaaagaggaaatatggtacacaaaataagtatacaggcctttccaagggtcttgaacccgaggaaaagtttaggtcaggtaagaatacctggagagagattagaagaaaaagaggaaaaagggaaaagaagaaagatcaattagcggaggtctctaggaaaaggagcctgtgcttatcgctggatgggctcggggagccagctcttagtagctctgaagcaggtgaagaatcctcctctgaggaaacagactgggaggaagaagcagcccattaccagccagctaattggtcaagaaaaaagccaaaagcggctggcgaaagccagcgtactgttcaacctcagggcagtcggcttcaaggtccgccctatgcggagtccccgccctgcgtagtgcgtcagcaatgcgcagagaggcagtgcgcagagaggcagtgcgcagactcattcattcccagagaggaacaaaggaaaatacaacaggcatttccggtctttgaaggagccgagggtgggcgtgtccacgctccggtagaatacttacaaattaaagaaattgccgagtcggttcgtaaatacggaaccaatgctaattttaccttggtgcagttagacaggctcgctggcatggcactaactcctgccgactggcaaacggttgtaaaagccgctctccctagtatgggcaaatatatggaatggagagcgctttggcacgaagctgcacaagcgcaggcccgagcaaacgcagctgctttgactccagagcagagagattggacttttgacttgttaacgggtcagggagcttattctgctgatcagacaaactaccattggggagcttatgcccagatttcttccacggctattagggcctggaaggcgctctctcgagcaggtgaaaccactggtcagttaacaaagataatccagggacctcaggaatccttctcagattttgtggccagaatgacagaggcagcagagcgtatttttggagagtcagagcaagctgcgcctctgatagaacagctaatctatgagcaagccacaaaggagtgccgagcggccatagccccaagaaagaacaaaggcttacaagactggctcagggtctgtcgagagcttgggggacctctcaccaatgcaggcttagcggccgccatcctccaatctcagaaccgctccatgagcagaaatgatcagaggacatgttttaattgcggaaagcctgggcatttt

SEQ ID NO: 220 - DNA, 4624 bp, mus mus
cggctcttgcttcttgctctcttgcttcttgctccttgcttcctgcaccctggctcctgaagatgtaagaataaagctttgccgcagaagattctggtctgtggtgttcttcctggccggtcgtgagaacgcgtcgaataacaattggtgccgaattccgggacgagaaaaaactcgggactggcgcaaggaagatccctcattccagaaccagaactgcgggtcgcggtaataaaggttcccgtaaagcagactgttaagaaggattcaactgtatgaattcagaacttttcagctggggaacgaggtaagtctgatcttgaactttctaaggaaattcaagacagtctatcagaagtaaagtggaaaatggctttacaagttatgtttggccttaaattttttctagtgttagaagcccttttgttccttttcacatgttatatagtgcttaagatagggctgaaaattctagaggaaattcaggacagtctatcagaagtaaagcggggagagagagtaggagcaaggagaaacggtaagtatacaggcctttccaagggtcttgaacccgatgaaaagttaaggttaggtaggaatacctggagagagattagaagaaaaagaggaaaaagggaaaagaagaaagatcaattagcggaggtctctaggaaaaggagcctgtgctcatcgctggatgggctcaggaagccagctcttagtagctctgaagcaggtgaagaatcctcctctgaggaaacagactgggaggaagaagcagcccattaccagccagctaattggtcaagaaaaaagccaaaagcggctggcgaaggccagtttgctaattggcctcagggcaatcggctaccaggtgcactcccgccctatgcggagtccccgccctgcgtagtgcgtcagcccgtagtgcgtcagcaatgcgcagagaggcagtgcgcagagaggcagtgcgcagactcattcattcccagagaggaacaggaaaatacaacaggcatttccggtctttgaaggagccgagggtgggcgtgtccacgctccggtagaatacttacaaattaaggaaattgccgagtcggttcgtaaatacggaaccaatgctaattttaccttggtgcagttagacaggctcgctggcatggcactaactcctgccgactggcaaacggttgtaaaagccgctctccctagtatgggcaaatatatggaatggagagcgctttggcacgaagctgcacaagcgcaggcccgagcaaacgcagcttgctctgactctccaaaaatacgctctgctgcctctgtcattctggccacaaaatctgagaaggattcctgaggtccctggattatctttgttaactgcccagtggtttcacctgctcgagagagcgccttccaggccctaatagccgtggaagaaatctggctctccctaatatgggcaaatatttggaatggagatctctgtggcgagaggctgcacaggcgcaggcccgagcaaacgctgctgctttaactccagagcagagagattggacttttgacttgttaacgggtcagagagcttattctgttaaacctgataagaggtatcaatggaaggtcttaccacagggaatgtccaatagtcctactatgtgtcaactttatgtacaagaagctcttttgccagtgagggaacaattcccctctttaattttgctcctttacatggatgacatcctcctgtgccataaagaccttaccatgctacaaaaggcatatccttttctacttaaaactttaagtcagtggggtttacagatagccacagaaaaggtccaaatttctgatacaggacaattcttgggctctgtggtgtccccagataagattgtgccccaaaaggtagagataagaagagatcacctccataccttaaatgattttcaaaagctgttgggagatattaattggctcagaccttttttaaagattccttccgctgagttaaggcctttgtttagtattttagaaggagatcctcatatctcctcccctaggactcttactctagctgctaaccaggccttacaaaaggtggaaaaggccttacagaatgcacaattacaacgtattgaggattcgcagcctttcagtttgtgtgtctttaagacagcacaattgccaactgcagttttgtggcagaatgggccattgttgtggatccatccaaacgtatccccagctaaaataatagattggtatcctgatgcaattgcacagcttgcccttaaaggtctaaaagcagcaatcacccactttgggcaaagtccatatcttttaattgtaccttataccgctgcacaggttcaaaccttggcagccacatctaatgattgggcagttttagttacctccttttcaggaaaaatagataaccattatccaaagcatccaatcttacagtttgcccaaaatcaatctgttgtgtttccacaaataacagtaagaaacccacttaaaaatgggattgtggtatatactgatggatcaaaaactggcataggtgcctgtgtggctaatggtaaagtggtatccaaacaatatgatgaaacatgttatggcatcatgtttgcttctccgttaaccggagaaaaagcctcacatgtgattcaacattgtcttgaggcatggagtgcttgggggaaacccagactccttaagactgataatggaccagcttatacgtctcaaaaattccaacagttctgccgtcagatggacgtaacccacctgactggacttccatacaaccctcaaggacagggtattgttgagcgtgcgcatcgcaccctcaaagcctatcttataaaacagaagaggggaacttttgaggagactgtaccccaagcaccaagagtgtcggtgtctatggcactctttacactcaattttttaaatattgatgttcatggccatactgcggctgaacgtcattgttcagagccagataggcccaatgagatggttaaatggaaaaatgtccttgataataaatggtatggcccggatcctattttgataagatccaggggagctatctgtgttttcccacagaatgaagacaacccattttggttaccagaaagactcacccgaaaaatccagactgaccaagggaatactaatgtccctcgtcttggtgatgtccagggcgtcaataataaaaagagagcagcgttgggggataatgtcgacatttccactcccaatgacggtgatgtataatgctcaagtattctcctgcttttttaccactaactaggaactgggtttggccttaattcagacagccttggctctgtctggacaggtccagacgactgacaccattaacactttgtcagcctcagtgactacagtcatagatgaacaggcctcagctaatgtcaagatacagagaggtctcatgctggttaatcaactcatagatcttgtccagatacaactagatgtattatgacaaataactcagcagggatgtgaacaaaagtttccgggattgtgtgttatttccattcagtatgttaaatttactaggacagctaatttgtcaaaaagtctttttcagtatatgttacagaattggatggctgaatttgaacagatccttcgggaattgagacttcaggtcaactccacgcgcttggacctgtcgctgaccaaaggattacccaattggatctcctcagcattttctttctttaaaaaatgggtgggattaatattatttggagatacactttgctgtggattagtgttgcttctttgattggtctgtaagcttaaggcctaaactaggagagacaaggtggttattgcccaggcgcttgcaggactagaacatggagcttccccctgatatatgatatatctatgcttaggcaataggtcgctggccactcagctcttatatcccatgaggctagactcattgcacgggatagagtgagtgtgcttcagcagcccgagagagttgcaaggctaagcactgcaatggaaaggctctgcggcatatatgagcctattctagggagacatgtcatctttcatgaaggttcagtgtcctagttcccttcccccaggcaaaacgacacgggagcaggtcagggttgctctgggtaaaagcctgtgagcctaagagctaatcctgtacatggctcctttacctacacactggggatttgacctctatctccactctcattaatatgggtggcctatttgctcttattaaaaggatagggggagatgttgggagccgcgcccacattcgccgttacaagatggcgctgacagctgtgttctaagtggtaaacaaataatctgcgcatgtgccgagggtggttctccactccatgtgctctgccttccccgtgacgtcaactcggccgatgggctgcagccaatcagggagtgacacgtcctaggcgaaatataactctcctaaaaaagggacggggtttcgttttctctctctcttgcttcttgctctcttgcttcttgctctcttgcttcctgcaccctggctcctgaagatgtaagaataaagctttgccgc

SEQ ID NO: 221 - DNA, 6852 bp, mus mus
cggctctcttgcttcgctctctggcttctctctcttgcttcgctctcttgcttcttgctctcttttcctgaagatgtaagaataaagctttgccgcagaagattctggtctgtggtgttcttcctggccggtcgtgagaacgcgtctaataacaattggtgccgaattccgggacgagaaaatccgggacgagaaaaaactccggactggcgcaggagggatacttcattccagaaccagaactgcgaatcaaggttataaggttcccgtaacacagactgttgagaaggattcaactgccgaattcagaactcatcagctggggaacgacggtgataaaggttcccgtaaagcagactgttaagaaggattcaactgtatgaattcagaacttttcagctggggaacgagagtaccagtgagtatgtttggccttgaattttttctggtgttaggagcccttttgttccttttcacatgttatcaagtggttaagatagggcggattctagatgaaattcaggacagtctatcagaagtaaagcggggagagagagtaggagcaaggagaaacggtaagtatacaggcctttccaagggtcttgaacccgaggaaaagttaaggttaggtaggaatacctggagagagattagaagaaaaagaggaaaaagggagaagaaaaaagatcgattagcggaggtctctaggagatactcgtcactagatgagctcaggaagccagctcttagtagctctgaagcagatgaagaatcctcctctgaggaaacagactgggaggaagaagcagcccattaccagccagctaatcggtcaagaaaaaagccaaaagcggctggcgaaggccagtttgctaattggcctcagggcaatcggctaccaggtgcactcccgccctatgcggagtccccgccctgcgtagtgcgtcagcccgtagtgcgtcagcaatgcgcagagaggcagtgcgcagactcattcattccccgagaggaacaaaggaaaatagaacaggcatttccagtctttgaaggagccgagggtgggcgtgtccacgctccggtagaatacgtacagattaaggaaattgccgagtcggttcgtaaatacggaaccaatgctaattttaccttggcgcagttagacaggctcgctggcatggcactaactcctgccgattggcagacggttgtaaaagccgctctccctagtatgggcaaatatatggaatggaaagcgctttggcacgaagctgcacaggcgcaggcccgagcaaacgcagctgctttgactccagagcagagagattggacttttgacttgttaacgggtcagggagcttattctgctgatcagacaaactaccattgaggagcttatgcccagatttcttccacggctattagggcctggaaggcgctctctcgagcaggtgaaaccactggtcagttaacaaaaataatccagggacctcaggaatccttctcagattttgtggccagaatgacagaggcagcagagcgtatttttggagagtcagagcaagctgcgcctctcatagaacagctaatctacgagcaagccacaaaggagtgccgagcggccatagccccaagaaagaacaaaggcttacaagactggctcagggtctgtcgagagcttgggggacccctcagcaatgcaggtttagcggctgccatccttcaatcccaaaaccgctccatgggcagaaatgatcagaggacatgttttaactgcggaaagcctgggcattttaagaaagattgcagagctccagataaacagggagggactctcactctttgctctaagtgtggcaagggttatcatagagctgaccagtgtcgctctgtgagggatataaggggcagagtccttcccccacctgatagtcaatcagcttatgtgccaaaaaacgggtcatcgggccctcggtcccagggccctcaaagatatgggaaccggtttgtcaggacccaggaagcagtcagagagacgacccaggaagacccacaagggtggacctgcgtgccgcctccgacttcctactaatgcctcaaatgagtattcagccggtgccggtggagcctataccatccttgcccccgggaaccatgggccttattctcggccgaggttcactcaccttgcagggcttagtagtccaccctggagttatggattgtcaacattcccctgaaatacaggtcctgtgctcaagccctaaaggcgttttttctattagtaaaggagataggatagctcagctgctgctcctccctgataataccagggagaaatctgcaggacctgagataaagaaaatgggctcctcaggaaatgattctgcctatttggttgtatctttaaatgatagacctaagctccgccttaagattaatggaaaagagtttgaaggcatccttgataccggagcagataaaagtataatctctacacattggtggcccaaagcatggcccaccacagagtcatctcattcattacagggcctaggatatcaatcatgtcccactataagctccgttgccttgacgtgggaatcctctgaagggcagcaagggaaattcataccttatgtgctcccactcccggttaacctctggggaagggatattatgcagcatttgggccttattttgtccaatgaaaacgccccatcaggagggtattcagctaaagcaaaaaatatcatggcaaagatgggttataaagaaggaaaagggttaggacatcaagaacagggaaggatagagcccatctcacctaatggaaaccaagacagacagggtctgggttttccatagcggccattggggcagcacgacccataccatggaaaacaggggacccagtgtgggttcctcaatggcacctatcctctgaaaaactagaagctgtgattcaactggtagaggaacaattaaaactaggccatattgaaccctctacctcaccttggaatactccaatttttgtaattaagaaaaagtcaggaaagtggagactgctccatgacctcagagccattaatgagcaaatgaacttatttggcccagtacagaggggtctccctgtactttccgccttaccacgtggctggaatttaattattatagatattaaagattgtttcttttctatacctttgtgtccaagggataggcccagatttgcctttaccatcccctctattaatcacatggaacctgataagaggtatcaatggaaggtcttaccacagggaatgtccaatagtcctacaatgtgccaactttatgtgcaagaagctcttttgccagtgaggaaacagttcccctctttaattttgctcctttacatggatgacatcctcctgtgccataaagaccttaccatgctacaaaaggcatatccttttctacttaaaactttaagtcagtggggtttacagatagccacagaaaaggtccaaatttctgatacaggacaattcttgggctctgtggtgtccccagataagattgtgccccaaaaggtagagataagaagagatcacctccataccttaaatgattttcaaaagctgttgggagatattaattggctcagaccttttttaaagattccttccgctgagttaaggcctttgtttagtattttagaaggagatcctcatatctcctcccctaggactcttactctagctgctaaccaggccttacaaaaggtggaaaaagccttacagaatgcacaattacaacgtattgaggattcgcagcctttcagtttgtgtgtctttaagacagcacaattgccaactgcagttttgtggcaaaatgggccattgttgtggatccatccaaacgtatccccagctaaaataatagattggtatcctgatgcaattgcacagcttgcccttaaaggcctaaaagcagcaatcacccactttgggcaaagtccatatcttttaattgtaccttataccgctgcacaggttcaaaccttggcagccgcatctaatgattgggcagttttagttacctccttttcaggaaaaatagataaccattatccaaaacatccaatcttacagtttgcccaaaatcaatctgttgtgtttccacaaataacagtaagaaacccactcaaaaatgggattgtggtatatactgatggatcaaaaactggcataggtgcctatgtggctaatggtaaagtggtatccaaacagtataatgaaaattcacctcaagtggtagaatgtttagtggtcttagaagttttaaaaacctttttaaaaccccttaatattgtgtcagattcctattatgtggttaatgcagtaaatcttttagaagtggctggagtgattaagccttccagtagagttgccaatatttttcagcagatacaattagttttgttatctagaagatctcctgtttatattactcatgttagagcccattcaggcctacctggccccatggctctgggaaatgatttggcagataaggccactaaagtggtggctgctgccctatcatccccggtagaggctgcaagaaattttcataataattttcatgtgacggctgaaacattacgcagtcgtttctccttgacaagaaaagaagcccgtgacattgttactcaatgtcaaagctgctgtgagttcttgccagttcctcatgtgggaattaacccacgcggtattcgacctctacaggtctggcaaatggatgttacacatgtttcttcctttggaaaacttcaatatctccatgtgtccattgacacatgttctggcatcatgtttgcttctccgtcaactggagaaaaagcctcacatgtgattcaacattgtcttgaggcatggagtgcttgggggaaacccagactccttaagactgataatggaccagcttatacgtcccaaaaatttcagcagttctgccgtcagatggacgtaacccacctgactggacttccatacaaccctcaaggacagggtattgttgagcgtgcgcatcgcaccctcaaagcctatcttataaaacagaagaggggaacttttgaggagactgtaccccgagcaccaagagtgtcggtgtctttggcactctttacacttaattttttaaatattgatgctcatggccatactgcggctgaacgtcattgttcagagccagataggcccaatgagatggttaaatggaaaaatgtccttgataataaatggtatggcccggatcctatcttgataagatccaggggagctatctgtgttttcccacagaatgaagacaacccattttgggtaccagaaagactcacccgaaaaatccagactgaccaagggaatactaatgtccctcgtcttggtgatgtccagggcgtcaataataaagagagagcagcgttgggggataatgtcgacatttccactcccaatgacggtgatgtataatgctcaagtattctcctgctttttaccactaaccgggaactgggtttggccttaattcagacagccttggctctgtctggacaggtccagatgactgacaccattaacactttgtcagcctcagtgactacagtcatagatgaacaggcctcagctaatgtcaagatacagagaggtctcatgctggttaatcaactcatagatcttgtccagatacaactagatgtattatgacaaataactcagcagggatgtgaacaaaagtttccgggatagtgtgttatttccattcagtatgttaaatttactagggcagctaatttgtcaaaaagtctttttcagtatatgttacagaattggatggctgaatttgaacagacccttcgaggcttgccatcattcaggtcaactccacgcgcttggacctgtccctgaccaaaggattacccaattggatctcctcagcattttctttctttaaaaaatgggtgggattaatattatttggagatacactttgctgtggattagtgttgcttctttgattggtctgtaagcttaaggcctaaactaggagagacaaggtggttattgcccaggcgcttgcaggactagaacatggagcttcccctgatatatctatgcttaggcaataggtcgctggccactcagctcttatatctcacgaggctagtctcattgcacgagatagagtgagtgtgcttcagcagcccgagagagttgcaaggctaagcactgcaatggaaaggctctgcggcatatatgagcctattctagggagacatgtcatctttcatgaaggttcagtgtcctagttcccttcccccaggcaaaacgacacgggagcaggtcagggttgctctgggtaaaagcctgtaagcctaagagctaatcctgtacatggctcctttacctacacactggggatttgacctctatctccactctcattaatatgggtggcctatttgctcttattaaaagaaaaagggggagatgttgggagccgcccccacattcgccgttacaagatggcgctgacatcctgtgttctaagtggtaaacaaataatctgcgcatgtgccaagggtatcttatgactacttgtgctctgccttccccgtgacgtcaactcggccgatgggctgcagccaatcaaggagtgacacgtccgaggcgaaggagaatgctccttaagagggacggggttttcgttctctctctctcttgcttcgctctctggcttctctctcttgcttcgctctcttgcttcttgctctcttttcctgaagatgtaagaataaagctttgccgc

SEQ ID NO: 222 - DNA, 1807 bp, mus mus
agcgccttccaggccctaatagccgtggaagaaatctgggcataagctccccaatggtagtttgtctgatcagcagaataagctccctgacccgttaacaagtcaaaagtccaatctctctgctctggagtcaaagcagctgcgtttgctcgggcctgcgcttgtgcagtttcatgccaaagagctctccattccatatatttgcccatactagggagagcggcttttacaaccgtttgccagtcagcaggagttagtgccatgccggcgagcctgtctaactgcaccaaggtaaaattagcattggttccgtatttacggaccgactcggcaatttctttaatttgtaagtattctaccggagcgtggacacgcccaccctcggctccttcaaagaccggaaatgcctgttgtattttcctttgttcctctctgggaatgaatgagtctgcgcactgcctctctgcgcagggctgacgcactacgcagggcggggactccgcatagggcggaccttgaagccgactgccctgaggccaatcagcaaactggccttcgccagccgcttttggcttccttaactgattagctagcactttacctggctggtacccttttttctcataatgagctgcttcttcctcccagtctgtttcttcagaggagaattcttcatctgcttcagagctactaagagctggctccccgagcccatccagcgatgagcacaggctccttttcctagagacctccgctaattgatctttcttcttttccctttttcctctttttcttctaatctctctccaggtattcctacctaaccttaacttttcctcgggttcaagacccttggaaaggcctgtatacttattttgtgtaccatatttcctctttgttcctactctctctccccgctttacttctgatagcttgtcctgaatttcctctagaattttcagccctatcttaatcacttgataacatgtgaaaaggaacaaaagggctcctaacaccagaaaaaattcaaggccaaacatattccactttacttctgatagactgtcttgaatttccttagaaagttcaagatcagacttacctcgtaaagctgtactcactggtactctcgttccccagctgaaaagttctgaattcatacagttgaatccttcttaacagtctgctttacgggaacctttattaccgcgacccgcagttctggttctggaatgagggatcttccttgcgccagtcccgagttttttctcgtcccggaattcggcaccaattgttattagacgcgttctcacgaccggccaggaaagacgcaacaaaccagaatcttctgcggcaaaactttattgcttacatcttcaggagcaggagtgtaagaagcaagagagagcgaaaacgaaaccccgtccctattaaggagaattctccttcgcctaggacgtgtcactccctgattggctgcagcccatcggccgagttgacgtcacggggaaggcagagcacatggagtagagaaccaccctcggcatatgcgcagattatttgtttaccacttagaacacagctgtcagcgccatcttgtaacggcgaatgtgggcgcggctcccaacacaggcccagaggctgagacgcatgccagggtttctttagctccacagtcaacattcttagctgtttccctggcttcatgaaatgagcactccctgtgtggcagttcgactgagaaatactccccataagttcatgtatgtgatcactggatgcctagctggagaacctttaagacgtg

SEQ ID NO: 223 - DNA, 1682 bp, mus mus
gagtgtcggtgtctttggcactctttacactcaattttttaaatattgatgctcatggccatactgcggctgaacgtcattgttcagagccagataggcccaatgagatggttaaatggaaaaatgtccttgataataaatggtatggcccggatcctatcttgataagatccaggggagctatctgtgttttcccacagaatgaagacaacccattttgggtaccagaaagactcacccgaaaaatccagactgaccaagggaatactaatgtccctcgtcttggtgatgtccagggcgtcaataataaagagagagcagcgttgggggataatgtcgacatttccacccccgatgacggtgatgtataatgctcaagtattctcctgcttttttaccactaactaggaactgggtttggccttaattcagacagccttggctctgtctggacaggtccagatgactgacaccattaacactttgtcagcctcagtgactacagtcatagatgaacaggcctcagctaatgtcaagatacagagaggtctcatgctggttaatcaactcatagatcttgtccagatacaactagatgtattatgacaaataactcagcagggatgtgaacaaaagtttccgggattgtgtgttatttccattcagtatgttaaatttactagggcagctaatttgtcaaaaagtctttttcagtatatgttacagaattggatggctgaatttgaacagacccttcgaggcttgccatcattcaggtcaactccacgcgcttggacctgtccctgaccaaaggattacccaattggatctcctcagcattttctttctttaaaaaatgggtgggattaatattatttggagatacactttgctgtggattagtgttgcttctttgattggtctgtaagcttaaggcctaaactaggagagacaaggtggttattgcccaggcgcttgcaggactagaacatggagcttcccctgatatatctatgcttaggcaataggtcgctggccactcagctcttatatctcacgaggctagtctcattgcacgagatagagtgagtgtgcttcagcagcccgagagagttgcaaggctaagcactgcaatggaaaggctctgcggcatttatgagcctattctagggagacatgtcatctttcatgaaggttcagtgtcctagttcccttcccccaggcaaaacgacacgggagcaggtcagggttgctctgggtaaaagcctgtaagcctaagagctaatcctgtacatggctcctttacctacacactggggatttgacctctatctccactctcattaatatgggtggcctatttgctcttattaaaagaaaaagggggagatgttgggagccgcccccacattcgccgttacaagatggcgctgacatcctgtgttctaagtggtaaacaaataatctgcgcatgtgccaagggtatcttatgactacttgtgctgtgccttccccgtgacgtcaactcggccgatgggctgcagccaatcaaggagtgacacgtccgaggcgaaggagaatgctccttaagagggacggggttttcgttttctctctctcttgcttctctctcttgcttcttgctctcttttcctgaagatgtaagaataaagctttgccgc

SEQ ID NO: 224 - DNA, 1924 bp, mus mus
gctctcttgcttctcgctctctcttgcttcttgcactctggctcctgaagatgtaagcaataaagctttgccgcagaagattctggtctgtggtgttcttcctggccggtcgtgagaacgcgtctaataacaattggtgctgaaacccgggacgagaaaaaactcgggactggcgcaaggaagatccctcattccagaaccagaactgcgggtcgcggtaataaaggttcccgtaaagcagactgttaagaaggattcaactgtatgaattcagaacttttcagctggggaacgagagtaccagtgagtacagctttacgagaatgaaaacaacccattttggataccagaaagactcacccgaaaaatccagactgaccaagggaatactaatgtccctcgtcttggtgatgtccagggcgtcaataataaagagagagcagcgttgggggataatgtcgacatttccactcccaatgacggtgatgtataatgctcaagtattctcctgcttttttaccactaactgggaactgggtttagccttaattcagacagccttggctctgtctggacaggtccagatgactgacaccattaacactttgtcagcctcagtgactacagtcatagatgaacaggcctcagctaatgtcaagatacagagaggtctcatgctggttaatcaactcatagatcttgtccagatacaactagatgtattatgacaaataactcagcagggatgtgaacaaaagtttccgggattgtgtgttatttccattcagtatgttaaatttactagggcagctaatttgtcaaaaagtctttttcagtatatgttacagaattggatggctgaatttgaacagatccttcgggaattgagacttcaggtcaactccacgcgcttggacctgtcgctgaccaaaggattacccaattggatctcctcagcattttctttctttaaaaaatgggtgggattaatattatttggagatacactttgctgtggattagtgttgcttctttgattggtctgtaagcttaaggcccaaactaggagagacaaggtggttattgcctaggcgcttgcagcactagaacatggagctccccctgatatatggttatctatgcttaggcaataggtcgctggccactcagctcttacatctcacgaggctagactcattgcacgagatggagtgagtgtgcttcagcagcccgagagagttgcaaggctaagcactgcaatggaaaggctctgcggcatatatgagcctattctagggagacatgtcatctttcatgaaggttcagtgtcctagttcccttcccccaggcaaaacgacacgggagcaggtcagggttgctctgggtaaaagcctgtgagcctaagagctaatcctgtacatggctcctttacctacacactggggatttgacctctatctccactctcattaatatgggtggcctatttgctcttattaaaaggatagggggagatgttgggagccgcgcccacattcgccgttacaagatggcgctgacagctgtgttctaagtggtaaacaaataatctgcgcatgtgccaagggtatcttatgactacttgtgctctgccttccccgtgacgtcaactcggccgatgggctgcagccaatcaaggagtgacacgtccgaggcgaaggagaattctccttaaaaagggacggggtttcgttttctctctcttgcttctcgctctctcttgcttcttgcactctggctcctgaagatgtaagcaataaagctttgccgcagaagattctggtctgtggtgttcttcctggccggtcgtgagaacgcgtctaataacacctaaatactttgtaaatatccaagtgccacagagtagtaaatgatgtcattgttt

SEQ ID NO: 225 - DNA, 1830 bp, mus mus
ggcttcttgctctcttttcctgaagatgtaagaataaagctttgtcgcagaagattctggtctgtggtgttcttcctggccggtcgtgagaacgcgtcgaataacaattggtgccgaattccgggacgagaaaatccgggacgagaaaaaactccggactggcgcaggagggatacctcattccagaaccagaactgcgaatcaaggttataaggttcccgtaacacagactgttgagaaggattcaactgccgaattcagaactcatcagctggggaacgacggtgataaaggttcccgtaaagcagactgttaagaaggattcaactgtatgaattcagaacttttcagctggggaacgagaatgaagacaacccattttgggtaccggaaagactcacccgaaaaatccagactgaccaagggaatactaatgtccctcgtcttggtgatgtccagggcgtcaataataaagagagagcagcgttgggggataatgtcgacatttccactcccaatgacggtgatgtataatgctcaagtattctcctgcctttttaccactaactgggaactgggtttggccttaattcagacagccttggttctgtctggacaggtccagatgactgacaccattaacactttgtcagcctcagtgactacagtcatagatgaacaggcctcagctaatgtcaagatacagagaggtctcatgctggttaatcaactcatagatcttgtccagatacaactagatgtattatgacaaataactcagctgggatgtgaacaaaagtttccgggattgtgtgttatttccattcagtatgttaaatttactagggcagctaatttgtcaaaaagtctttttcagtatatgttacagaattggacggctgaatttgaacagatcccttcgagaattgagacttcaggtcaactccacgcgcttggacctgtcgctgaccaaaggattacccaattggatctcctcagcattttctttctttaaaaaattgggtgggattaatattatttggagatacactttgctgtggattagtgttgcttctttgattggtctgtaagcttaaggcccaaactaagagagacaaggtggttattgcccaggcgcttgcaggactagaacatggagcttcccctgatatatctatgcttaggcaataggtcgctggccactcagctcttatatctcacgaggctagtctcattgcacgagatagagtgagtgcgcttcagcagcccgagagagttgcaaggctaagcactgcaatggaaaggctctgcggcatatatgagcctattctagggagacatgtcatctttcatgaaggttcagtgtcctagttcccttcccccaggcaaaacgacacgggagcaggtcagggttgctctgggtaaaagcctgtgagcctaagagctaatcctgtacatggctcctttacctacacactggggatttgacctctatctccactctcattaatatgggtggcctatttgctcttattaaaagaaaaagggggaactgtgggaagccgcccccacattcgccgtcacaagatggcgctgacatcctgtgttctaagttggtaaacaaataatctgcgcatgagccaagggtatttacgaccacttgtactctgtttttcccgtgaacgtcagctcggccatgggctgcagccaatcagggagtgatgcgccctaggcaatggttgttctctttaaagagggaaggggttttcgttttctctctcttgcttcttgctctcttttcctgaagatgtaagaataaagctttgtcgc

SEQ ID NO: 226 - DNA, 716 bp, mus mus
tgagagcacgctctgcgctttggcgcgccggagctctggctcctaaaattattgaggggctttcgtttttggggctgggcgctgggcgcttgctctcctggctcccaaagatgtaagcaataaagttttgccgcagaagattctggtctgttgcatctttcctggccgggcgtgagaacgcgtctaataagaattggtgccgaattccgggacgagaaaaaaaaaactcgggaccggcgcagggaagatccctcattccagaaccagaactgcgggtcgcggtaataaaggttcccgtaaagcagactgttaagaaggattcaactgtatgaattcagaacttttcagctggggaacggcggtaacccgtaagtatagctttacgaggtaagcctggccttgaactttctaaggaaattcaagacagtctatcagaagtaaagtggaaaatagctttataaggtatgtttggccttgaactttctctagtgttagaagcccttttgttccttttcacatgttatcaagtggttaaggcagggcggattctggatgaagttcaggacaatctatcagaagtaaagcggggagagagagtaggagcaaagagaaaatatggtacacaaaataagtatacaggcctttccaagggtcttgaacccgaggaaaagtttaggtcaggtaagaatacctggggagagattagaaggaaggag

SEQ ID NO: 227 - DNA, 1101 bp, mus mus
tgtattatgacaaataactcagcaggaatgtgaacaaaagtttccgggattgtgtgttatttccattcagtatgttaaatttactagggcagctaatttgtcaaaaagtctttttcagtatatgttacagaattggatggctgaatttaaacagatccttcgagaattgagacttcaggtcaactccacgcgcttggacctgtcgctgaccaaaggattacccaattggatctcctcagcattttctttctttaaaaaattgggtgggattaatattatttggagatacactttgctgtggattagtgttgcttctttgattggtctgtaagcttaaggcccaaactaagagagacaaggtggttattgcccaggcgcttgcaggactagaacatggagcttcccctgatatatctatgcttaagcaataggtcgctggccactcagctcttatatctcacgaggctagtctcattgcacgagatagagtgagtgtgcttcagcagcccgagagagttgcaaggctaagcactgcaatggaaaggctctgcggcatatatgagcctattctagggagacatgtcatctttcatgaaggttcagtgtcctagttcccttcccccaggcaaaacgacacgggagcaggtcagggttgctctgggtaaaagcctgtgagcctaagagctaatcctgtacatggctcctttacctacacactggggatttgacctctatctccactctcattaatatgggtggcctatttgctcttattaaaagaaaaagggggaactgtgggaagccgcccccacattcgccgtcacaagatggcgctgacatcctgtgttctaagttggtaaacaaataatctgcgcatgagccaagggtatttacgactacttgtactctgtttttcccgtgaacgtcagctcggccatgggctgcagccaatcagggagtgatgcgccctaggcaatggttgttctctttaaaatagaaggggtttcgtttttctctctctcttgcttttctctctctcttgcttcttgctctcttgcttcttgctctcttttcctgaagatgtaagaataaagctttgcc

SEQ ID NO: 228 - DNA, 4551 bp, mus mus
  misc_feature (3859)..(3859): n is a, c, g, or t
ttttttcttttcttttttcttttccttccttctaatctctctccaggtattcctacctaaccttaacttttcctcgggttcaagacccttggaaaggcctgtatacttattttgtgtaccatatttcctctttgttcctactctctctccccactttacttctgatagcttgtcctgaatttcatctagaattttcagccctatcttaatcacttgataacatgtgaaaaggaacaaaagggctcctaacaccagaaaaaattcaaggccaaacatattccactttacttctgatagactgtcttgaatttccttagaaagttcaagatcagacttacctcataaagctgtactcactggtactctcgttccccagctgaaaagttctgaattcatacagttgaatccttcttaacagtctgctttacgggaaccctttattaccgcgacccgcagttctggttctggaatgagggatcttccttgcgccagtcccgagttttttctcgtcccggaattcggcaccaattgttattagacgcgttctcacgaccggccaggaaagacgcaacagaccagaatcttctgcggcaaaactttattgcttacatcttcaggagcaggagtgcaagaagcaagagagagagaaaacgaaacccgtcccttttttaggagagttatatttcgcctaggacgtgtcactccctgattggctgcagcccatcggccgagttgacctcacggggaaggcagagcacatggagtggagaaccaccctcggcatatgcgcagtttatttgtttaccacttagaacacagctgtcagcgccatcttgtaatggcgaatgtgggcgcggctcccaacaggtttgcagggctctatccctgactttttttaatcatgctagagagtgcatccatctcatttaaaattcagcatgcactacctattggggtgtagagccatcacagcatcccctgaggttggtaaagggttcccacaagtatacggaaggagttaaagataggggctatataggttttgttgggtcatgtgtagcaagagccatatttttagggctgcattgacagaatttagagcttggacctcctctggggacagtattctctggtaaggagagacttttgtctcctttcaggatgttgaagaggggttgaagggtgcttctaggaagggggagccagggccaaagccagttgaggttgcccagaaagctctggagggaggcaagagttaattcttgagggaaggaaagggtgggtttgagggagtgtattgaggtgagcgagatctctgctcataaaaatgtaatgggtgcaataagttgaattttgtgagagtttatttcaaatcctagggcagatagggaaagtattagctgctccttaaattgggagggagaggtagaagagtctccccatactaatatatcatccatataatggtatatattgaatcctctgtctaaatagatttttaatgcagtggctacagcctccggacaaatggttggactgttagccattccctgagggacaacagtcaattcatatcgtgagggtggcccagagttgttaatggggggcactgagaatgcaaagcattcgaagtctcaggatggagagagattaaaaaaaaaagccaggctgtctgtgcacagttcactgccccacaacacagcagtacttagctgacttccagtgaaggttgggggtggacctctaattcctgatgggctggcatgtgtgtcctcactgtaatgaatcccgcactgacatatcttaagacatggatgaaaggtaaaacatttaccacaggtcaccacaaattcctgaatctccaaaagtttccaggtgatacatcacagccaggaatgaagaagtatcccattccttgataagcaaaattgtcagtcattcctaatcaaaaaaaaaaagagtatagtgcataaaattttagaaaatagaaatacaattaaatttatgttagtgattactgaacattgctatcattctataaaagtgtgtgaaacttggaactgctaagtaagtgtcattgtattatagaatgattcacatttcatttcttatatcatgcacatatgtgtatatatttacatatatacatttacatatttctgtattcctaacaattaagaatgtgaaaaaaattatttgtcatgtacagagtttcactggccatactcacaaactgggttctattaatataataacatctgacccacgctcacagtcttaattgtgttcacactaataacatctgacccagtgctcagagattggattctgttcatactagtaacacctactctagtgccctaatttgaacttttagcagttttctcaaaaaatgaattacttattcttgctgacacaccaaaagagtatgtaaaatattagaaaactttagtccatttttatgaaaactgatattgtaagattagtgctgtttagggccagacacgatggttcatacttttaatcccagtactcaggaggcagagggcaagtggatccctgcccaatcacagccagccaaagctacatgatgcattgctgtctcaaaaccaaaaaaacaaagactcgtggtacatctatatacaagtgtacttcatttgttacttcagtatggctgtgacttttctgttcccagcctacaatgttttctaacatctcaataactaatttccaatcatactttttgaagctccacaatattgtgtcaacaaaactcaggttaggagagggttatccatgtgtactctcacaacacattcactaacacctgcacactatagtcatttagtttttactcttctgttcctaagattcatctccttcagaatagacattgtgctatcaaagatagcattcttttattgcatactgccattaaatactgatctaagccattgttatccttgttcagatcatgtttaggtggccatgtacatgagaattattggtgtaatttctaaaaatactaaaaaaaaaacccacaatctcatagcaagcttactaatcctctgtctcttaccatctttttgccccccccccacttgtgcaatattcggtgagccttagaatagatagctatggaagaatgagtagggtggtcctggaatgggagggccaaacagacaggaagaagagggagatgaatgaggtagggaacatgagaagggacagctaaaactaagagccatttgaggggctcatctggagacctcatacagcagaggcaccctaaaacatatgtgaaggcaatctaaatagaataaccaaaaaatgtgggaggtggtactcaaactgaacatctcacatcaccaaatgaactgaactctgcaactctgcattttgatttgttgttattttctatcatgtctttccctatgctaaagtacacaggaaaagaccatgaggacccaatcctacacaaaaaactatgtgaaactaagaaaggctgagagtgagaggaatagtcttcaccagggaaagcataccaactggttattcaatatcaaatgctcagccctgagaacatacacacaattaatgacatgcagaacaagcccaccatcatatatatgtacacacatcaccaataccaccaccaccaactaatgaaaacacaagcggggatttggaaagagaaaaagagagcaaggaggagtataagagaagactgggttagagaagagggatggattaaatgttataattatataagaatctcaggggaaaaatgaaatatataacaaaactggtcaagtaaacttagtatatggaaccatagtttataatgggtaatatgtgnaccagttttacccccaattaagttatgtcactacaagataaaaagagttgctatcttagaaaaaaaaaatcataaaattggggttaaaattagcttcttgtacctggagtttgagcaggagtcctatccactttaaagctctttctttagtctgctctcgtttccctcgttgagacaagtaagtcaataatccttgttgaatctcaaggtattcatgcctcagtaaaaagtttctattaatctctgactatttctttccattgaatggctttcccaaatgaaccctagccataaatgttctacattggacctagcacttgaaattcaaatgccattgcttgtccttaaacactagggataatttacaactgaaaagtttctcatctcttttctttcactattatctttatatgagtcaaaatttcttttcctgttagagctgctttgagcatttttttaaataaaaacattaatgtttctattactctcctaagagagttacaaataacctgctctaggtcagtgttctctctttcctttggcaaaacagtatctttgcagttctgttccttagttggctggccctagtcttttctacatttgcaaaacacacacatgcacatgcacgggggtggggaggtggggggcagagtcacagagagacagacagacagagagacagagaacaaagc

SEQ ID NO: 229 - DNA, 331 bp, mus mus
ggatgtgagggcgatctggctgcgacatctgtcaccccattgatcgccagggttgattcggctgatctggctggctaggcgggtgtccccttcctccctcaccgctccatgtgcgtccctcccgaagctgcgcgctcggtcgaagaggacgaccttccccgaatagaggaggaccggtcttcggtcaagggtatacgagtagctgcgctcctctgctagaacctccaaacaagctctcaaggtccattgtaggagaacgtagggtagtcaagcttccaagactccagacacatccaaatgaggcgctgcatgtggcagtctgctttctttt

SEQ ID NO: 230 - DNA, 6347 bp, rattus
tgtctttgagcttcactcccaggctcaggtctccagtttcttgtttaatgtcataattagaagaaagtcttgagaagatttttgtcctgactgaacagatttttgaccagccaactagcaagccatgcattgtcctcatccttacactccctgcaatatggctccttgtgtgggacaaggctgtgacctggatagcttccaaactggctggaagaaagtgtgtgacttcaatgtgagtatattttgcacatgaagaaccacagattcttcacctgagattcacatctaacaagtggggtcttctttcctccagtagagcagtggtcaaacggacagcatttaagggattactgaagaagcacgagacaattatcagcaatccaaggcattcttctatcaaaagtgttttcagctaatttggattatactatttgagtaggaaagataaaaatcagaagacagaacctggtcaccatcactttgcagattgcttgaatgcttggaagatcacctgagtgcctgcaccaatcctgtgtccatcttatgttgaagggagcatcgaggctctttccatggttaagatgattgagcaaaaaggatccattcacagctccggcaacatctctggaataactgtgtgaaggaactctgccaagagctggaattgcagttaacatagaagcttgaggcatagatagctgtatcatctggttaataactgccatttgaaggagtctgcaacacagtgtgaccaattgcctcagtgtgtccaggtctatcctagtttcctgaggcacatacttcccatcttacaagtggaaatagagcaaaaaccatatacacaggctcttgggatttgaatgtgaaatgatgctcaaatgttggactacttatcctcactttggggagcagcttggagcacagatatctgtaccatctgcttagaaacttccatttgaagaagtttgcaatatggtgtgatcaagttgcttcggaggtaaaggacttttaagactgtggccttgttagcaggaaaaggtagctgggggtgggcctggaagatgatctctaccttaattccagctaagcactctggttcctggttctgcaagatgtgaacaaatgtcttagtcagggtttctattcctgcacataaacattatgaccaagaagcaaattggggaggaaagggtttattctgcttagaagtctacattgctgttcgtcaccaaaggaagttaggaccagaattcaagcagctcaggaagcaggagctgatgcagaggtcatggagagatgttacttactggctcagcttgctttcttgtagaacccaagactaccagcctagggatggccccacccacaatgggctcttccacccttgatcactaattgagaaaatgccttacagctggatctcatgaaggcatttcctcaaggaaagctcctttctctgtgataactaagcttgtgtcaagttgacatacaaaatcatccagtacaacaagtcacgttataacctctcaatgtcactgaatgagacccaccatgcctttcttgtaatgatagaccaatacctctaaaacagcagttctcaaaggtcatggcctctttggggtacaaagagtatcacatatcagatatcctgcgtatcaaatatttaattatgatgattcataacatagcaaaattatagttatgaagtagcaatgaaaataattttatggttgggatcttaacaatatgaagaactgtattaaagggctgcagcattaggaaggttgagagccactgctttaaaacattatcattgtgtcacagtgacacaatgaccgaagttaactggactggatgggtctgaataacacaacacttaagtcagtctgggaaggcccacccacccagtctgtcactcattatcaatttcaacttgcatgtgttgagaaagcatcttcttagactcctagctggattagctcactgggctaacctggtacaaggaattggacattttggtgggccaacatcgagaaggatagattcgagaaagactagagtagattatgtatgatctctagcacctggcactgacccccttccctccacttcatatattttctccctcaagacaggatatggtgaagtggattctgtccaagaggagagcgagggccttcaggaaaaacaggtctctattcagggaaataaagccttgaaacatctctggattgcccattaagcagcactgtaagaggtggactgattcttgccacatggaaactcttcatgatgaagggttaatgcaggacttttaaaaagtgccccctgtttccaaactgaatagtttgtctagaaggagggattttgttttcttttcagactggacctaaatttggcatcctatggaagttttactttattccatcagcactcagccaagtctcctgggtcaggaacagcagctgagaaaagttgaatgaatggcccattttctctcttcattcctatccttaattccatatgtttctcaatttctcacttataaatttaattagataaatatttttaaatgtggaaggtggagactttgagaactcgatggatttgaaataaacttttgtggctcgtggcactttcagcctctgctatgcatttagagaaacaagcagcggagagccattgtaaggaagaaggatcggggtttactggaagagatctttgtgcctaaacaccggggtagggaagccataggaatgtggatagccctgggagataacactcttacaataagtgggtaattgtgtttatgggaatggagatatttatatgattggtttcttggattaacttcagggaaatgagaaaacgctcactgagtgtttacttggaatttcgttagaggtgcactttgtctcctgtgtcagcaccagatccccaggaatgagactgcagatgtcttagacaaggtttcagggaaatgcctcaaagtgatccaaaagggaaacaaagcttgcgcttgctcgagcctaatgttacaggaggtgctaactcagtgtttgttgactgtgtggccttcagccaggaagtgaaactcgaagcatttagcgggcttttagaatgaggcttccttttcatggaggtgtggatgggacgggctagcaactctgaaactactctctgaattttagcactgagcaaaaaccagggatctctactatagacagtgttctcacaataaggcccccttattctcatgttaatgataagagagagaataaatccaatggtatcaagttagcgctggagttctctcatgagctcatattccgaacatagacctccagagggactgattgatgtgtctggttataaatatggagatgaagaccccactacaggcgtgtgcatttgtgtgtttgcattctagctctatcattttatgaggcctacctaacagtaatgagtccatggtagcaatgaacatgtcaagcatccaggctcagttcttaaacacattctctactaagaggaatttgaactctttgaagaactggtggactccgtgccccaaggggaagaaaagtaaaagacaagcctacagcatcttttcagtttagaaagtaacaagagactcaaaacaagatgagagaaaggacagaggtttcagcttgtgggagcttctattggtcagctctgagagcgagctagataaggggttaattattattttaaatattgtagcttattgactgaaagcggaatccactgtcagctaaaggagaatgagggaaaggccatctttctatccaaaagccaactaatacacgaagcagggatgatgaaatgaaaaaattaccatttggcagaaggagcgtgtgggtctagacagtgagggttttccaaaccagtttataggatctccatgaagctgctgactgacttttgaggagcaaagtattcgagtttttgcaggactaattataaacctaggcagtgacatgtctcactaatgggactgtgtcaaaggctaccatttaggatgatgtgttgggtgtggatgtagggtccctgccctgccatgaacactggtgatttcaccccatgttcatactgagcctaaacactgaaggcaagttaaagagtcccttataacttagtcaggtcctttggctctaatagacaccagtttgctcagaggtatcgagcacatattgtctcacctacagactcttgagctatgtcgtgtttataaggtaaatggggtaaaagaacaaagtggttggggagatgctcagtcatcagtgcctgttgtgcaagcctgtggtcttgagttcagtccctgagaaccaacatcaaagttggtcctagcagcatacacttgtaactccattgctggggaggcagagaaagacagatccttgtggtcagtcaaattgatgagatctaggtcccagtgagagagccagtctcaagaaataagatagaaagcatttgaagaaggactcctgaggttggccactagcctccacaggcatagacaccaatgtacacccatgtatttgcatgcactcttgcacacacacacacttgataaaccagtcacccaggagacaggaaaaaatacctgtttccatgttataatctagttttactgcaggacagaaaggtgggagtgtgttgctgctcataatctggagaaattcacaagttcattcagctctgctcaattctgtcttctctcccatgtaggtatgacggggaacgtgctctatgaaacagaaccctagaaacacttactgaatttgaactttgtgttgctttctgatatccgtgcttgggattctgaatgactccagttggatttgattggacccagggtagcgagagaaatgaggggacaaggcatacacatagtgcataagcaggtcagccaacctcataaacaggcacctcactagaaacatctgcacagccttttagtgaagagttgggtatctagagctatcatgattgagtgggaaggagatcactgcctccctcaggaggccttcctgagatttgtgagatggcaagaatgagattgggaagtggggagacagaaggcctcgtcctgtcctgagcatcgagtccctgctggctctcagagtctgctcactcttgcaaggtcacacacttttatttatgttacagtcaggctgaaagagacatggagcactctgggggtattaaccaggaagaaatacaattcagatttaagcagaggaaagagaagcctcagccagctgcatgggaacaggaaggacattacatgctactttagctggtctctttcctgctggggcaagtcaatgcgtaaatgataaaatttatagtgcatggagggttgagagccagactcgcatcatttgagtctgaattccggtcctgaatagagtgcttattgtctcccttggtccccctcttccaatggaaccagtctctgccgggtagcatcacagagtcttctcacagagttggaggtattagcaaagcagggcttggtttggagagtgagacattgacactgatctttagttaaaatggtctcttctcaggaagactcatgacatcatacatttctagaacaggacagatcttcaaaaacatgaactgcaagtttcctatccatagtggaaggtggaaacggaaggaagaaggcatggtccggtctttcaggaagactctgcaggaaggataccacggacaagggctgaaaatctaaatccaactctgaaaacatcacgtgacagacactgccttaccatgtacacacccagatgatccaactttcatgtcaatgacagtgttcatctgaaaaagacccagcttgaccccttacctaagtcacctgagagatgggagccaaatccacttcctgttcaggtgtcatagaaaggagagcccattctgtccctagattcagtgctgccaagaccctgagggcttgagaaaaagaattctaatgaagtttttgttttgctttgttttgtttttcaaacaatagtggctttgttggcacaatcaagaagccctcaaagcatgtgagtgtgagggatggtggtgagtaatgtggttttaaaatgaagtcttgagtattggcccttgcttttgaagcccttttttatcaactgcctcagaggataaaatgaaatagttgggcaaagtgttcagtactgtctttttactatttgtttaaaatgcattgatgctatctcatcccttctgtttttagaataaatcaaagcccgccgaaaaaaaaaaaaaaaaaaaaaaaaaaaaaaaaaaaaaaaaaaaaaaaaaaaaaa

SEQ ID NO: 231 - DNA, 3934 bp, mus mus
gatcccttatgaaatgatgtcttctgtcgtgtagtccaccacccccaccctgggagcatacgacaaaatgcctgcttatcctagataggacactgacagcaccccaaagaaaccattccacccaaacctggcagagtaaagcagtgagttacctacaagaggatgcatgaaaggttactacggggaatcaggatgataattcacaaaagctacatccctagagctcgctgagtataactctcagatagctccactggttgagaccctactctctctggcattactactacttatataacttcaaagtaacatttctgaaccctgtgtctaaaacactgttttctgatctttgtcagtttccttattttctttgtcttaggtaggcttggtctaggaagggggaggagtttgtaggagatagtcatacaacctgagtttataaaattgttgctttcagactagcaagacaatggaaatgccctctggcggtatagggaaatatgaatcagcaagtgaactgttgagagctcatggtcctcagacaaccggagtgtagatgaacccaaactatcattggtttctcaaatacaagcaatgatctacactcatgaggtcagtgtgtaagaaattaggatggatgctagagttgtgttgcttagtgtggtgtaaatgttcagtctgtagaaaagccaaggttcactttctgattcctgggcattaagactcaccccgtatttagatctatcatctttctgtagttatagttttatgtggaatggaatatgatagctattgtttttctaattcaaagcaagttttagttactaggagagttcatttctaactgctgtggtgtgaggcattttaacagcacctctaatctacattttatgccacgtatagtctgatgctaactttctgagcagggacaggatctactctttagtgtgtgtcagaattcccagagcttctgcttggcaccattacaacaccacacctagagtttctgcttcagtgtgtccctacacctagttaggtagggtgatgttgggggatcctagtgtggcatattgtttctagtaagaattcatagtaaaaacagtctagtctgtctctgatgctctcccttctagtaagagtttttattcacaccagttgggttcttatttttgattactgagttcagcaaccaagaaacaaatttctcagatgaaaccacctttaagccattgtggaatgctaatgctcttgtcgcagttaattctctcagctcttcatcctaaaggcattagatgtgataccaggggttagtgtttgcatggcaggtatgagaggaagaggccttttagaatgacatccattcattactttgtagctgcctctggattgttgtgcaaagaaatagcatgactcccatgaatgttctactgtgtgggctttcataccgtacacaataccagatttaaggcatgccaaaatatctagagcagttagtcaaggaagtgatgtatatgttccctaaatggggacagcacaaaggacacgtgacagcatcttccagaagtcacctgaaggagtaggtgctgtgttccagagtccccagtttcttaaccttgaccagttttctttctgtacccatggtgtcttgtgttgttactcaacaatatagccaagaaaagtatattattctatgttattatagcaaaatatcggatacaagctatattaaatggaaaaaaaaagacagtgactcataatgcccatcattcaagattcaaagagaattttgtattttcttcagaaagtccttttaggctgcatcataccatatccggagtgtatgtatctctctctctctctctctctctctctctctctctctctctccctccctctctctctctctctctctctctttctctctctctctctctgtgtgtgtgtgtgtgttgcttctttgaaaagctaacagagttaaattaatatggtttaaccataaagatctgatctaatctaatctaatctaatttactctaatcacttcctcaaacctttccattttagcaccatagtcatattaagtttccatagtcatagtaccattagtatgtgactgtgaattatagttatctagttatcacatttaatagatgaacatatgctgtaaatggatatgttaaattaatttatatgatagcatctggctggtccaacagtggttgtcatgatggagatacggataacctggtacttgttcagttcataattttgggtacctccaatatatatgtatgtatatgtgtatacatacacacacacacacacaaagagagacagacagacagacagacagacagacagactgtggtgaattcctagagccaccaattttcagactatgttcaaagcccaaaagagctagaatcaggaatcagtgatggaacacagcagtcgtagcaacaggatagatgagcttatcaatgagagtgagaacaagtggggaaaagatttaaaaaagtcccttctttcatctcctcttctctgggataccaatagaaggtgttacccatatttaaggtagatttccctacttcaaataatctgatcaaaaacatccctcacacgagttcccaatggtttgccttttagttgattctaaagccattcaacttgacgtgattagccattacagtgattaaagtcctaattaatgaagattgagggactaatcatattccaaccatttacctcaagggtttgcctgtgagtggaaaagaatgggcatatctcttactaagacttatataccactgggagagtaagagagtttgtgtctgtgtgtgtatgtgtgtctatgactttgtatgtctgtgtgtgtctgtgtctgtttgtgtgtgtctgtatatgtctctctctctctgtgtttcatttctatgtgaagcatacactatgtttttaaatattcagtgttcattacagaagaattaaagaatttcagtagccagtcactgaatggtcacattatgcagcattgaggggtaaaatttatacaacacacaactcttctgtgactcacagtgggggagagggacattgtgttaaggaaactcacattattgtagaacatcttcccctggtgacatcactatgggaagccctttaagccagagtgtcctcagagaggtagaacatcccatgctgcaggcaagttctattaaacataggaagcacacaactcagcagatttaggaagtccctgaaaatgtggcccctctctcctcaagttcacatgagatctaagcactgcctttagacttctcagagcagccagctgagctccctggaagaggctcagtgtaaaggagctccttagaaaaactctctgacttgttactatgcctgcaggctgtgcagtgtgttgtagatctccatctgaatgagctgttacccatgcatgctagggtggactttggcgatgtatctgtcactgagtcatagctgctcctataagtaactcctcaccctttacctgtaagtagccccaataaaatttactggttcacccagtagggttttgctggtatccttgctttgatttttttttttgttagtctctgtgtacaatgagtagatctgtgttcacatctccccagaaagcacgttacatgacatgcatcatgtgcaatagaaggtgatttctaagtgcatacaaagaaaggatgagccgggcagtggtggtgcacacctgtaatcccagcacttgggaggcagaggcaggcagattttggagttcaagtccagcctggtctacaaagtgagttccaggacagccagagctacacaaagaaactctgtttcagaaaaaaacagaaagaaagaaagaaagaaagaaagaaagaaagaaagaaaaaaaaaaaaaaaaaaaaaaaaaaag

SEQ ID NO: 232 - DNA, 306 bp, mus mus
  misc_feature (29)..(29): n is a, c, g, or t
  misc_feature (41)..(41): n is a, c, g, or t
  misc_feature (216)..(216): n is a, c, g, or t
  misc_feature (231)..(231): n is a, c, g, or t
cagtttgttgcttttcgagacagggtttnttctgtggagtnctggctgtcctgtaactcactctgtagaccaggatggccttgaactcagaaatcccaagtgctgggattaaaggtgtgtgtcaccactgcctactagtttttttttttaattatttttaatcaagattcactattttaccaatgacttaacaagggagagcccccatgcagagtntagtaagacatagtntagtacaaaggggatgatagaagctgtggctcagaaaagagagggagggcacactgttcagagcacatattcctg

SEQ ID NO: 233 - DNA, 1017 bp, mus mus
tgtctttgaacttcactcccaggctcaggtctctagtttcttgtttaacgtcctaattagaagaaagtcttgagaggaattttgtcctgactgaacagatttttgaccagttatcaaggcatgtcttggcttcatccttatcctcttgcaacatggctcccatgtgtgacaaggctgtgacctggatagataccaaactggctcgaagaaattgtgtgacttctatgtgattctccacttgagattcacatctaataacaagggtctcctttcctccggtagagcaggtgtaacatttcccaattctgagtcagccctcatggtccctgagttatcaacatatctgcctcagggaaactgccatatcaatgtcactcaatgggattgctagggaagaaaagcctgctgaagcctttttagagtgtggagttgaggaaacttaaacaataggcctaagaccccagcccaaggtggtggcacccactttaaggatatgtcttctcagctcaatgaacataatcaaggtagcttgaacgcttagaagatcgccggagtgcctgcactaatcctgtgtctgtcttctgttgaatggagcatcggggctccttccttggttaagatgattgagcagaaaggatccattcacagtttcagcagcatctctggaatggctatgtgaaggaacactgcaaagagctggaattccaggtagcatagcagcttggagcatagacaggacatggtgaagtggattctgtccaagaggagagagcagggccttcaggaaaaacaggtccctattcagggaagtgaaagcgtctgagacgtctctggattgtccattaagcagcactctaaaaggtggactgattcctgccccatggaaactcttcatgatgaagggttaatgcaggactttaaaaagtccctcccgtttccaaaatgaacagtttgtcttgaaaaaaaaaaaaaaaaaaaaaaaaaaaaaaaaaaaaaaaaaaaaaaaaaaaaaaaaaa

SEQ ID NO: 234 - DNA, 323 bp, mus mus
gctgggcgtggtggcgcacgcctttaatcccagcactcgggaggcagaggcaggcggagttggaggccagcctggtctacaaagtgagttccaggacagccagggctatacagagaaaccctgtcttgaaaaaccaaaagaaaaaaaaaagattcagggtggcgtataaggtttatgtctcgttgggttatattatttataactaagtagcagttgaaagaaacatatatattcctttttttttttttttttttttttggttttttgagacagggtttctctgtgtagctctggctgtcctggaactcactctgtagaccagg

SEQ ID NO: 235 - DNA, 278 bp, mus mus
gccgggcgtggtggcgcacgcctttaatcccagcactcgggaggcagaggcaggcgtatttctgagttcgaggccagcctggtctacaaagtgagctccaggacagccagggctatacagagaaaccctgtctcgaaaaaccaaaaaaaaaaaaaaaaaaaataacttttggttgtagttgttgtttttgtttttgttttttcgagacagggtttctctgtgtggccctggctgtcctggaactcactttgtagaccaggctggccttgaactcagaa

SEQ ID NO: 236 - DNA, 27 bp, artificial sequence
  Primer
gatcagcaagcagctgggataccagtg

SEQ ID NO: 237 - DNA, 25 bp, artificial sequence
  Primer
ctgtagcggtcccgttgctgcggtg

SEQ ID NO: 238 - DNA, 25 bp, artificial sequence
  Primer
cctattgcatggactgcagcttatg

SEQ ID NO: 239 - DNA, 25 bp, artificial sequence
  Primer
gactagacatgtcttaacatctgtc

SEQ ID NO: 240 - DNA, 20 bp, artificial sequence
  Primer
acagcgtggtggtaccttat

SEQ ID NO: 241 - DNA, 18 bp, artificial sequence
  Primer
tatactcagagccggcct

SEQ ID NO: 242 - DNA, 20 bp, artificial sequence
  Primer
tcctcgtgctttacggtatc

SEQ ID NO: 243 - DNA, 84 bp, artificial sequence
  Primer
gccgggcatggtggcgcacgcctttaatcccagcacttgggaagaggcaggcggatttctgagttcgaggccagcctggtctac

SEQ ID NO: 244 - DNA, 87 bp, artificial sequence
  P 53 binding site
gccgggaattgtggcgaactcctttaatcccagcacttgggaggcagaggcaggcggatttctgagttagatgccagcatgttctac

SEQ ID NO: 245 - DNA, 20 bp, artificial sequence
  Primer
ctccacgctgcgttcctgct

SEQ ID NO: 246 - DNA, 20 bp, artificial sequence
  Primer
tcggaccaccatccaggcgt

SEQ ID NO: 247 - DNA, 20 bp, artificial sequence
  Primer
cagccagctctcaccgagcg

SEQ ID NO: 248 - DNA, 20 bp, artificial sequence
  Primer
gccgagactgctgctgtcca

SEQ ID NO: 249 - DNA, 20 bp, artificial sequence
  Primer
tgtgacgtggggtccgacga

SEQ ID NO: 250 - DNA, 20 bp, artificial sequence
  Primer
agggtagaagcccagggccc

SEQ ID NO: 251 - DNA, 24 bp, artificial sequence
  Primer
tggctagtcctaattgcccttggt

SEQ ID NO: 252 - DNA, 24 bp, artificial sequence
  Primer
tcaggaccatggcttgaccatcat

SEQ ID NO: 253 - DNA, 16 bp, artificial sequence
  Primer
gctccggcatgtgcaa

SEQ ID NO: 254 - DNA, 19 bp, artificial sequence
  Primer
aggatcttcatgaggtagt

SEQ ID NO: 255 - DNA, 20 bp, mus musc.
gcctttaatcccagcacttg

SEQ ID NO: 256 - DNA, 20 bp, mus musc.
ctctgtgtagccctggtcgt

SEQ ID NO: 257 - DNA, 24 bp, mus musc.
gcacctgactgctcttccagaggt

SEQ ID NO: 258 - DNA, 25 bp, mus musc.
tcttcagacacaccagaagagggca

SEQ ID NO: 259 - DNA, 20 bp, artificial sequence
  primer
tggatgggctcgggaagcca

SEQ ID NO: 260 - DNA, 20 bp, artificial sequence
  Primer
tctctgcgcactgctgacgc

SEQ ID NO: 261 - DNA, 20 bp, artificial sequence
  Primer
gccgctcggcactcctttgt

SEQ ID NO: 262 - DNA, 20 bp, artificial sequence
  Primer
cctgccgactggcaaacggt

SEQ ID NO: 263 - DNA, 20 bp, artificial sequence
  Primer
ggtcgctggccactcagctc

SEQ ID NO: 264 - DNA, 20 bp, artificial sequence
  Primer
taacggcgaatgtgggggcg

SEQ ID NO: 265 - DNA, 25 bp, artificial sequence
  Primer
tggcgaggaaaactgaaaaaggtgg

SEQ ID NO: 266 - DNA, 25 bp, artificial sequence
  Primer
gccatattccacgtcctacagtgga

SEQ ID NO: 267 - DNA, 26 bp, artificial sequence
  Primer
ctgtaggacgtggaatatggcaagaa

SEQ ID NO: 268 - DNA, 27 bp, artificial sequence
  Primer
tttctcatttttgacgtcttttagtga

SEQ ID NO: 269 - DNA, 135 bp, mouse
  misc_feature (89)..(89): n is a, c, g, or t
gccgggcatggtggcgcacgcctttaatcccagcacttgggaggcagaggcaggcggatttctgagttcgaggccagcctggtctacanagtgagttccaggacagccagggctacacagagaaaccctgtctcg

SEQ ID NO: 270 - DNA, 209 bp, mouse
gggctggagagatggctcagtggttaagagcacctgactgctcttccagaggtcctgagttcaattcccagcaaccacatggtggctcacaaccatctgtaatgagatctgatgccctcttctggtgtgtctgaagacagctacagtgtacttacatataataaataaataaataaataaatcttaaaaaaaaaaaaaagaaagaaaaa

SEQ ID NO: 271 - DNA, 234 bp, mouse
gacctgtaatatggcgagaaaacagaaaatcacggaaaatgagaaatacacactttaggacgtgaaatatggcgaggaaaactgaaaaaggtggaaaatttagaaatgtccactgtaggacgtggaatatggcaagaaaactgaaaatcatggaaaatgataaacatccacttgacgacttgaaaaatgacgaaatcactaaaagacgtcaaaaatgagaaatgcacactgaaa

SEQ ID NO: 272 - DNA, 63 bp, mouse
gggcatggtggcgcacgcctgttcgaggccagcctggtctgttccaggacagtttcccagcaa

SEQ ID NO: 273 - DNA, 20 bp, mouse
ggtccagagtttcccagcaa

SEQ ID NO: 274 - DNA, 80 bp, mouse
tggcgagaaaacagaaaatcggacgtgaaatggcgaggaaggacgtggaatggcaagaaaccacttgacgcttgaaaaat

SEQ ID NO: 275 - DNA, 26 bp, mouse
agcttaggcatgtctaggcatgtata

SEQ ID NO: 276 - DNA, 94 bp, rodent
gccggttgtggtggcgcacgccggtaggatttgctgaaggaggcagaggcagagggatcacgagttcgaggccagcctggtctacacatttttt

SEQ ID NO: 277 - DNA, 147 bp, mouse
agccgggcgtggtggcgcacgcctttaatcccagcactcgggaggcagaggcaggcggatttctgagttcgaggccagcctggtctacaaagtgagttccaggacagccagggctatacagagaaaccctgtctcgaaaaaacaaaa

SEQ ID NO: 278 - DNA, 149 bp, mouse
agccgggcgtggtggcgcacgcctttaatcccagcactcgggaggcagaggcaggcggatctctgtgagttcgaggccagcctggtctacatagcgagttccaggccagccagggctacatagtgagaccctgtctcaaaaaaacaaaa

SEQ ID NO: 279 - DNA, 149 bp, mouse
agccgggcgtggtggcgcacgcctttaatcccagcactcgggaggcagaggcaggcggatctctgtgagttcgaggccagcctggtctacatagcgagttccaggacagccagggctacatagtgagaccctgtctcaaaaaaacaaaa

SEQ ID NO: 280 - DNA, 149 bp, mouse
agccgggcgtggtggcgcacgcctttaatcccagcactcgggaggcagaggcaggcggatctctgtgagttcgaggccagcctggtctacagagcgagttccaggacagccagggctacacagagaaaccctgtctcaaaaaaacaaaa

SEQ ID NO: 281 - DNA, 150 bp, mouse
agccgggcggtggtggcgcacgcctttaatcccagcactcgggaggcagaggcaggcggatctctgtgagttcgaggccagcctggtctacagagtgagttccaggacagccagggctacacagagaaaccctgtctcaaaaaaacaaaa

SEQ ID NO: 282 - DNA, 148 bp, mouse
agccgggcagtggtggcgcacgcctttaatcccagcacttgggaggcagaggcaggcggatttctgagttcgaggccagcctggtctacagagtgagttccaggacagccagggctacacagagaaaccctgtctcgaaaaaacaaaa

SEQ ID NO: 283 - DNA, 148 bp, rat
agccgggcggtggtggcgcacgcctttaatcccagcactcgggaggcagaggcaggcggatctctgagttcgaggccagcctggtctacagagtgagttccaggacagccagggctacacagagaaaccctgtctcgaaaaaacaaaa

SEQ ID NO: 284 - DNA, 193 bp, mouse
ggggctggtgagatggctcagtgggtaagagcacccgactgctcttccgaaggtccggagttcaaatcccagcaaccacatggtggctcacaaccatccgtaacgagatctgactccctcttctggagtgtctgaagacagctacagtgtacttacatataataaataaataaatctttaaaaaaaaaaaaaa

SEQ ID NO: 285 - DNA, 193 bp, mouse
ggggctggtgagatggctcagtgggtaagagcacccgactgctcttccgaaggtccggagttcaaatcccagcaaccacatggtggctcacaaccatccgtaacgagatctgacgccctcttctggtgtgtctgaagacagctacagtgtacttacatataataaataaataaatctttaaaaaaaaaaaaaa

SEQ ID NO: 286 - DNA, 195 bp, mouse
ggggctggagagatggctcagcggttaagagcactgactgctcttccagaggtcctgagttcaattcccagcaaccacatggtggctcacaaccatctgtaatgggatctgatgccctcttctggtgtgtctgaagacagctacagtgtactcacatacataaataaataaataaatctttaaaaaaaaaaaaaa

SEQ ID NO: 287 - DNA, 188 bp, rat
ggggctggagagatggctcagcggttaagagcaccgactgctcttccagaggtcctgagttcaattcccagcaaccacatggtggctcacaaccatctgtaatgggatctgatgccctcttctggtgtgtctgaagacagctacagtgtactcatatataataaataaataaatctttaaaaaaaaaa

SEQ ID NO: 288 - DNA, 188 bp, rat
ggggctggagagatggctcagtggttaagagcactgactgctcttccagaggtcctgagttcaaatcccagcaaccacatggtggctcacaaccatctgtaatgagatctgatgccctcttctggtgtgtctgaagacagctacagtgtacttatatataataaataaataaatctttaaaaaaaaaa

SEQ ID NO: 289 - DNA, 188 bp, rat
ggggctggagagatggctcagcggttaagagcactgactgctcttccagaggtcctgagttcaattcccagcaaccacatggtggctcacaaccatctgtaatgggatccgatgccctcttctggtgtgtctgaagacagcgacagtgtactcatataaaataaataaataaatctttaaaaaaaaaa

SEQ ID NO: 290 - DNA, 188 bp, rat
ggggctggagagatggctcagcggttaagagcactgactgctcttccagaggtcctgagttcaattcccagcaaccacatggtggctcacaaccatctgtaatgggatccgatgccctcttctggtgtgtctgaagacagctacagtgtactcacatacataaaataaataaatctttaaaaaaaaaa

SEQ ID NO: 291 - DNA, 189 bp, rat
ggggctggagagatggctcagcggttaagagcacccgactgctcttccagaggtcatgagttcaattcccagcaaccacatggtggctcacaaccatctgtaaagagatctgatgccctcttctggtgtatctgaagacagctacagtgtacttatatataataaataaataaatctttaaaaaaaaaa

SEQ ID NO: 292 - DNA, 189 bp, rat
ggggctggagagatggctcagcggttaagagcacccgactgctcttccagaggtcctgagttcaattcccagcaaccacatggtggctcacaaccatctgtaaagagatccgatgccctcttctggtgtatctgaagacagctacagtgtacttatatataataaatgaataaatctttaaaaaaaaaa

SEQ ID NO: 293 - DNA, 188 bp, rat
ggggctggagagatggctcagcggttaagagcactgactgctcttccagaggtcctgagttcaattcccagcaaccacatggtggctcacaaccatctgtaaagagatccgatgccctcttctggtgtgtctgaagacagctacagtgtacttatatataataaatgaataaatctttaaaaaaaaaa

SEQ ID NO: 294 - DNA, 191 bp, rat
ggggctggagagatggctcagcggttaagagcacccgactgctcttccagaggttatgagttcaattcccagcaaccacatggtggctcacaaccatctgtaaagagatccgatgccctcttctggtgtatctgaagacagctacagtgtgtacttatatataataaataaataaatctttaaaaaaaaaa

SEQ ID NO: 295 - DNA, 216 bp, rodent
ggggctggagagatggctcagcggttaagagcactggctgctcttccagaggacccgggttcgattcccagcacccacatggcggctcacaaccatctgtaactccagttccaggggatccgacgccctcttctggcctccgcgggcaccaggcacgcacgtggtgcacagacatacatgcaggcaaaacactcatacacataaaataaaaataaa

SEQ ID NO: 296 - DNA, 198 bp, rodent
ggggctggagagatggctcagtggttaagagcacttgctgctcttgcagaggacccgagttcggttcccagcacccacatcaggcggctcacaaccgcctgtaactccagctccaggggatccgacgccctcttctggcctccgcgggcacccgcacwcacacgcgcacrcacacacrcacaataaaataaaaataaa

SEQ ID NO: 297 - DNA, 292 bp, rodent
  misc_feature (259)..(259): n is a, c, g, or t
ggggctggggagatggctcagtcggtaaagtgcttgccttgcaagcatgaggacctgagttcgatccccagaacccacgtaaaaaagccgggcgtggtggcgcacgcttgtaatcccagcgctggggaggcagagacaggcggatccctggggctcgctggccagccagcctagcctacttggtgagctccaggccagtgagagaccctgtctcaaaaaacaaggtggacggcgcctgaggaacgacacccgaggttgncctctggcctccacacacacacacacacacaca

SEQ ID NO: 298 - DNA, 292 bp, rodent
ggggctggggagatggctcagtcggtaaagtgcttgccgcgcaagcatgaggacctgagttcggatccccagcacccacgtaaaaagccaggcgtggcggcgcacgcctgtaatcccagcactggggaggcggagacaggaggatccctggggctcgctggccagccagcctagccgaatcggtgagctccaggttcagtgagagaccctgtctcaaaaaataaggtggagagcgattgaggaagacacccgacgtcgacctctggcctccacacacacacacacacacaca

SEQ ID NO: 299 - DNA, 165 bp, Cavia porcellus
ggggttggggatttggctcagtggtagaacgcttgcctagcaagctggaaaccctgggttcggtcctcagctccaaacctgaaaaacaaaaaatccctataaaaaaacacaaaatataaaaaagaccaaaaacaaacaaggtaactgcgcacacaaacaaccttt

SEQ ID NO: 300 - DNA, 124 bp, Cavia porcellus
ggggctggggatttggctcagtggtagaacgcttgcctagcaagctggaagccctgggttcggtcctcagcaccaaacctgaaaaacaaaaaatccataaaaaaaaaacacaaaagataaaaaa

SEQ ID NO: 301 - DNA, 142 bp, rat
ggggttggggatttagctcagtggtagagcgcttgcctagcaagcgcaaggccctgggttcggtcctcagctctggaaaaaaaaaaagacaaaataacaaaaagaccaaaaaaaaacaaggtaactagcacacacaaccttt

SEQ ID NO: 302 - DNA, 152 bp, mouse
ggggttggggatttagctcagtggtagagcgcttgcctagcaagcgcaaggccctgggttcggtcctcagctctggaaaaaaaaaaaaaaaaaaaaagacaaaataacaaaaagaccaaaaaaaaacaaggtaactggcacacacaaccttt

SEQ ID NO: 303 - DNA, 152 bp, rat
ggggttggggatttagctcagtggtagagcgcttgcctagcaagcgcaaggccctgggttcggtccccagctctggaaaaaaaaaaaaaaaaaaaaagacaaaataacaaaaagaccaaaaaaaaacaaggtaactggcacacacaaccttt

SEQ ID NO: 304 - DNA, 420 bp, mouse
tgttgtggatagccctggggctaattatatttgatgttaattccgttctcctgtgagtggctgcgaacaaggaatgagtcagcactcaggtgatttcctgtaaacctgcttcccaccttaatttgtaaaataaaggagagctgatgattgggcagataaaagggaaggtggagcggaaggtggggagagagaagaaggagaaaatggaagagggagaggacgcagaggaggaggaagaagaagaaaagcggagcagaagcacatggcctggagaaaccgcaagttctaaggggtctcatagatgtggaagatggtagtgtagcggtagatctgcccaatctaggcgcacagcatgtattcatattaattgagttgtgttttcattgccggggcatatttgggttggagatttaccgcaac

SEQ ID NO: 305 - DNA, 415 bp, mouse
tgttgcggatagccctggggctaattgtatttgatgttaattctgttctcctgtgaggggctgcgaacaaggaatgagtcagcactcaggtgatttcctgtaaaccttcttcccaccttaatttataaaataaaggctagagccggtgattgggcagagaaagaggggaaggtggagctgaaggttttgggagagaaagagagagaggaaggaggacgacagaggaggaggaagaaggaaagtggagcagaagcacctggcctggagaaaccgcaagttctaaggggtctcttatatggggaagatggtagtgtagtggtagatctgcccaatctaggcgcacagcatgtattcatattaattgagttgtgttttcattgcccgggcttatttgggttggagatttaccgcaaca

SEQ ID NO: 306 - DNA, 272 bp, bull
ggagaaggcaatggcaccccactccagtactcttgcctggaaaatcccatggacggaggagcctggtaggctgcagtccatggggtcgctaagagtcggacacgactgagcgacttcactttcacttttcactttcatgcattggagaaggaaatggcaacccactccagtgttcttgcctggagaatcccagggacgggggagcctggtgggctgccgtctatggggtcgcacagagtcggacacgactgaagcgacttagcagcagcagc

SEQ ID NO: 307 - DNA, 227 bp, ruminant
gggcttcccaggtggcgctagtggtaaagaacccgcctgccaatgcaggagacgtaagagacgcgggttcgatccctgggtcgggaagatcccctggaggaggrcatggcaacccactccagtattcttgcctggagaatcccatggacagaggarcctggcgggctacagtccatagggtcgcaaagagtcggacatgactgaagtaaytgagcatgcatgcatry

SEQ ID NO: 308 - DNA, 173 bp, bull
agtgcatgatcagtctcgtgatcagtgcatgatagccacgtgatcagtgcatgatcagtcacctgatgggtgtatgatcattcacatgacctgtacatggtagctacatgatcattgcatgatcagccaagtgagtagtgcatgatagccacgtgatcactgcatgacgggcc

SEQ ID NO: 309 - DNA, 1402 bp, bull
aggctgcctcttgtgttggcccaggcaagtccaatcttccattcgagttgcgaaggaaagctggggattgctctcgagtgactgcagggccaatagacctcatctaggcttgtgtccagaagccagtgttcctctccaggggcgacagggatctcggggttgcattccagacgcacccggggagacaggcattcatctcgagtggaagcaaagaacgtccgctctgctctcgaatcgcgacgggtatctcttggagctcactgggtggactcaagggagtcaagcctcctgaggcgtttggagagaggtcgcgagattggtctctaggccacgcaggagacgaaggccctcatctctcgatgacgggggaatctcggggttgttctcgagcggcggccccagtgtgcggtttctcacgaggtacgacggcgaggtcagtgagcctctcgtggggcgccagggaagtcgggtctccatgcgagtggcgagggggagcgcgtcattgctcccgagccatggtaggggaatgtggcctcgagacgtgttgaagaaggtctctcgaggtctttctcgggttgaggcaggaaaccctgggttccctcgacttgtgcaggtgacctcagggggcttctcatggtggctctgagaagccagggaaactggaggtgggaggggcctctcgggactccactgggcttggtgcattggaagagggcctcatctccagttgaggcaggaaccgcagggtacctctgatttcagactccgatcgcagggtccctgcagactggggacaggagagtcaggcctcgtcttgggttgaggcatggaactccgcttgcctctcgagatgtccccggggagagaggccgcttgtcgagctgtatttggaacctggggttttttccgaacgatgcacggaaaaactgccccttcgtgttgacttcattcacaggctggagttcggagaggtgtccgggcatcgggttcttatcaagaggggaccgggaaatcggggtcctacggaatgtggaaccacccacgaggccacgtctggaatgtcttcgtgagaccggcctcatcctgaggtgcgaccggaaggatcgggaaccccttccagacaaagcaggggagtcgaccctcctgtccagatcaggaggggagaaagggctcagaggagggggtgccggaaaacctcagtgttcctctcgagggagaccgggatttcggggaactttgtgggtcgcatcaagggtgccaagggccctttcgacctccaattcctaacgtgggacttctcctgaggcgcagtagcgggaaagggcttcatcttgcgatgacgggggagccacgtggtttttctcgagttacggcgggattctcgagttacgacggggaattc

SEQ ID NO: 310 - DNA, 306 bp, Ochotona princeps
gggcccggcacggtagcctagtggctaaatcctcgccttgcatgtgccaggatcccatatgggcgccggttcgtgtcccagctgctccacttcccatccagctccctgcttgtggcctgggaaagcagtagaggatggcccaaagccttgggaccctgcacccacgtaggctcctggctttggatcggctcagctctggccattgtggccacttggggagtgaaccagcagatggaagatctttctctctctccttctctctgtaaatctgactttccaataaaaataaataaatcttttaaaaaa

SEQ ID NO: 311 - DNA, 233 bp, Dipodomys ordii
gccgggcgccggtggctcacgcctgtaatcctagctactcaggaggctgagatctgaggatcgcggttcgaagccagcccgggcaggaaagtccgtgagactcttatctccaattaaccaccagaaaaccagaagtggcgctgtggctcaaagtggtagagtgctagccttgagcaaaagagctcagggacagcacccaggccctgagttcaagccccatgaccgacaaaaaa

SEQ ID NO: 312 - DNA, 7492 bp, Procavia capensis
tttgggggctcgtccgggaatcagggcgaccaccccctcagtctcgaagccgctcttggaggtaaaataacgggctagccttgtctgtctgtccagttcatcgtgtctgtgtttttgcttcggtacggcgcttagacttctggtttcggttttggcggaatccggagggtgccggcttgagttttggttttgcagttgtttgaactcaccgtgagggtgagcaaacggaggccggtagacgtgcctgaagggtctcaaactgcaccctgggggacgccccaggggagagagagggaccagggacgcctggttgcctcctatgagaaggacgaggataaggktcggtttttggatgtggaattcccgattaccgcccgtctgacctcctcttccttttgtggaaaactaagcccggccgttggttgctgattctgtcctgttctgtcctgtttttgtccttgtctctgtgtgtctggtttaaggtcatgggacagacgtcgtcctctcctcttgcccttactctagctcactggtcggacgttaagaatcgctctcatgacttatcaatagaggtaaagaagcgtccgtggcagacattctgcgcctccgagtggccggcactcggtgtgggctggccaccggagggtacctttgactctgaaataatcgctgctgttaaagctcttgtttttcagcgtggacccggtcgacaccctgaccaacagccatacatacttctstggcaggacctggttcagaatcctactccatgggtaaagccctggctgccgaggcgcacgtcctccgcgtcacatattttggctgcccttccctctgactcccctccaaacccacctggcccccctcctaaatctgttcccaagatttatccttccacccacgacctcgtmcttcctgaaaatgaccttcctccaccttaccccccttcatccmctcctcaacccccttctgctcccccagctccggcgggagcagaactcagsacccccccgsttcagggggccccgcatctgggacccggagccgccgaggagtctcccccgataccacaattgctctccccctgmgagagattggcccaccccctgcccccactgcggatgatcagcaggccctccggcccctccaatactggcccttttcctcttctgaccttataattggaaatctaatcaccctcctttctctgaggatccccaacgccttacaggtcttatggagtctctcatgttttcccaccaacccacctgggatgattgccaacagcttctccagactttgttcaccaccgaagaaagagaaaggatcttgatggaagcccggaaaaacgttccaggagaagacggcctacccacctccctccctaatctcatcgacctcgcgttccccttgaaccggcctaattgggattacaaccagcctgaaggtagggagaggctacgagtctatcgccaggctctgcggcaggtctccgaggggctgccggcgccccaccaatttggctaaggtaagggagattcagcagggaccgaaagaggctccgtccgtctttttagaaagaataatggaagcttttagaaggtatactccctttgatccaacctccgagggacaaaggggctcagtagccatggctttcataggacaagccgccccagacattagaaggaagctacagaggttagaggggctgcaggatcaatcactgcaggatctcgttagagaggcagagaagatataccatcgtagggaaacggaagaggagaaagaacagcgcataaaaaaggaacaggaggaaatagaaaggcaaagagatcgcagacgaaataaagatctcacacggatcttggccgcagttattgatagggagggagcgagccggtcagggagaaagggcaacctgggcaatcaggggaccagaagacggaggcttgaaaaggatcaatgcgccttctgtaaggaaaaagggcattgggcccgggattgccccgagaaaaaggcccagaaaaaaatcctgagcctaacggaggatgattagggaggtcagggctcagaccccctccctgagcctagggtaactcttaaagtggaggggaagccagttgagttcctggtggatacgggggctcagcactctgttttgctgcgcccttctggacccctctctaacaaaaagtcctgggtgctaggggccacggccagcaacaatattcatggactacccgaagagctgtgacctgggagtgggccgggtaacccactcattcctagtcatacctgaatgtcctgcccctctgttggggcgagacctcttaaccaagctgggggctcaaattacctttacccccgaagggcccaaagtcactaaagaaggccaagtaattacagcccttaccatgcggttagaagacgaacaccgacttttcgagccggcccccgagactgtagagataacagactgggtaaaaaaatttcctgaggcctgggctgaaacggctggaatgggactagctaaacagcgacctcctgtggtcatagaactgaaagcctcggctgaccctattgcagtccgccaatatcccatgagccgggaagccagggaaggaataaagccacatatcgagagactgctgaaacaaggggtattgatcccttgtaagtctccgtggaatactcctcttctcccagtacgtaaaccgggtactcaagacttccgcccagtacaggatttgcgcgaggttaataaaagagtattggatatccatcccaccgtcccaaatccttatacattgctgagtatgttaccccctgagcatacctggtactcaaccttagatttgaaggatgcgttcttttcccttcgtcttcacccccgcagtcaacacatctttgcattcgaatggaaagatcctaaatcaggaactactgggcagttaacatggacaaggctaccacaggggtttaaaaactcccctacattgttcgacgaggccttacatcaggatttagctcctttcaggacctctcatccacaggtaactctgctccagtatgtggatgacctcctcttagctgcctcgactgctgatgcctgccgccagggcactgctgaactcctgcaggagctctcttccttgggataccgtgtgtcagcaaagaaagctcagatatgtcggcaggaggtaacctacctgggatatattttaagagatggacagaggtggctaacagaagccaggaagcagacggttacccaaatcccaataccttcctctccaagacaagtaagagaatttctaggtacagcgggattttgtagattatggatacctgggtttgctactaaagccgctcctctctacccgttaaccaagaactcagttccctttgtctggggtaaggagcaacagcaggccttcgatgacatcaaacaagccttgctatcagccccagctttggccctccctgatgtgactaagcccttcaccctcttcgtggatgagagaaagggaatagccagaggagtcctaacccaaaccctggggccctggaaaagaccagtagcatacctatccaaaaagctggacccggttgccagcgggtggccagcctgcctaaaatcagttgcttcggtagcaaccctggtcaaagatgccgacaaattaactctgggacaaaaactaactatagtggcaccacatgccctagaaagcattattcgccagccgcccgagaggtggctgtctaacgccagaatgactcattatcaaagtctcctcctaaataaagaacggatccagttcgcttccccggccaccctgaaccctgccaccctgatgcccgaaatcgaagaaggagctgaggtgctccacacctgccaggagattctagcagaggaaacaggagttcgacgagacctcagcgaccagccccttcccgacgccgagctcacctggtacaccgacgggagcagttacatcgcagaaggtaagagattggctggggctgcggtagttgattccaaaactgtaatatgggccagcagtttacctgaaggaacgtcggcccagaaggctgagctaattgccttaacccaggccctaaaactagcagaaggcagaaagattaactatatacggacagtcggtacgcatttgctactgctcatgtacatggtgccatctaccggcagcgaggactcttaacatctgcaggaaaagatattaaacacaaagaagaaattttagatctgttagaagcagtacataaacctcaaaaagtggctattatccactgtccaggacatcagcggggacagtcagatatagcccttgggaaccaacgggctgataaagaagccaaacgagcagctgaaggactaaacgtcctcaccctaaatacatctgaaaccaaattggctgctaatgacgacgctatcctggttgccagataccccccgattcgggacactccagctacaagtactatgtctctagggctgctttctcagacccctatagatgaggacttgaagcccgatgaagatctcaaatatattgaacaccttcacaaaatgactcatctaggagaacggcgcctcctagcgttagcacaaaaatctccccactaccaatgtcctcgtaaattaaaaaaactgagagaaaatgtaaaacaggtagtaaagaactgtgtgccttgtcaactggtaaacgctcatgcctcctctaaaacccaaggcagtagattccgaggagaccgccctggagtctattgggaagttgacttcacagaaataaaacctgcaaaatatggaaacaaatatttactagtatttgtagataccttttcaggatgggttgaggcataccccacaaaggctgaaacggcgtcggtggttaccaaaaagatcctagaagaaattttacccaggtatggagtccccaagatgttggggtcagacaatggtcctgcctttgttgcccaggtaagtcagggtctggccaagatccttggggtaccgtggaaattacattgtgcttacaggccccaaagttcaggtcaggtagaaagaatgaatagaactctaaaagagaccatgactaaattatccatagagactggcttaacagactggatagccctccttcctatggccctattcagggctcgaaatacccctaattggatgggactgaccccttttgaaatcctatatggaacaactccgcccttagccactctaagatcacaggcttcccccgaaaatgtaactaattcctctctactctctagactccgagcccttaagttgatccagcaggaggtgtggaaacccctcacagctgtctatcagccgggtgatatcaggactccacaccagttccaggtcggagacaccgtctacgtgaggcgacatcgctctgggaaccttgagacaaggtggaaaggaccttacgtcgtgctcctgaccacccccactgccatcaaggtagacggagtcagcgcctggatccacgcctcccatgccaagcccgctccacatggggaccaacaatggactgcagataagactgataatccacttaagcttcgtttgcgtcgcgttcctgcctccagtgataagtaataccaaccctcacaccccttatacattaacctggaaaataactgacctccagacccatgaaatccttaattccacctcagtagtggcccccttgggcacttggtacccggacctctatttcaacctggaggaggtggcagatctcaaggggatccgggaagtatggagacaaagacaacggagggtctctataagtagaaatggattctatgcatgtcccgggtttagacccaaaaacgagagaaataaatgcgggggaatagaagttttatattgtaaaagttgggcctgtgtaacaacaaacgatggggaacggaaatggactactaacccatccccaggcttaatcactatgaaattcgtgcggccttgtactcgcacccgctattctgacacttgcaatttagtacgaattagattcgaagaaacagcaaagggagatgcccgatggatcacgggagaattaatttggggagtctatctctatcaaactccccttttgggacaccgattcagattagactaacagcctcacccgtttcacccctcccagtaggaccaaactccatcctacctgaacaacagccccccaaacagtcagtccctcaggccccaataccccacttttccactcaatcctcggctattacagccccgacttccagcttaccttcaaccctgatccccgctcaagctccagccccagcaggcacaggacagagactgttaaatctgatagaaggtgctttccgtgtcctcaacagcacctacccaccttgacccagtcctgttggttatgtttgacctctatccctccatattatgaaggggtcactctttcagggaacttctctaacgtcaccactcaccgacactgcagttggggaacagaaaacaaactgaccctgactgaggtctcagggacagggggaacttgtatcggaaccccgaaagacccccaacaaagaaacctctgtaaccaaaccttaacgagcccccgcacttccaccaactattatttagttcccccagtaggaggctggtgggcatgcaatacgggacttacaccctgtatttccacctcagcgtttaactcatctcaacatttttgcgtcatgatacaactaatgcctagaattatttatcatgactctaccagcttcatggccgaattcgaccaacaccttaccagatttagaagagaaccagtttccctgacactggcagcccttctaggactaggagtagcggctggagtaggcactggcacggcagccttggtcaatacacccctacagcttaaccatctgagggcagccatagacgaagatctgagagccattgaacagtccattactaaactagaggactcattaacatcgttatccgaagttgtccttcaaaaccgaaggggacttgatatgatcttcctcaaagaaggtgggttatgtgccgccttgaaagaacaatgctgtttctatatagatcactcaggcgtaataagagactctatgacgaaactcagagaacgtctaaatcagagacagagagaacgcgagactaaccagggactgtttgagtcctggttctctcgatctccatggcttaccaccttaatctccacccttctgggccccctactcattctcctcctactgttaaccatcgggccctgcttaatcaacaagctggtaacctttataagagaaagagtaagcgctgtacagattatggtcctcagacagaaataccagcaggtagagactagagaaatgaccataccttaagggttccatgattggaccccacagcattctccaaaaagaaaaaaaaggggggggggaa

SEQ ID NO: 313 - DNA, 8112 bp, Sus scrofa
  misc_feature (213)..(213): n is a, c, g, or t
  misc_feature (412)..(412): n is a, c, g, or t
  misc_feature (3927)..(3927): n is a, c, g, or t
  misc_feature (7814)..(7814): n is a, c, g, or t
tttttggtgcgttggccgggaagccgacaaccgagctggcctcttgtgccaccgttgtcggggaaccgggggaggccacggtcgccggcccggtgacaggtggatagcgcgcaccggccattttgccggatccagaccctcactcgggccgtgctggccttggcccacaccgcttcccgaacggactcagaaggagagtggaaacaggttccnggacaggacgtcggactggtgagtgccccggggacatctgcccgagtcaggacccgccatacggcggaaggagagactgatcacctctcagtgaccaaagggtcactcaggtcagggtttgctcccttgggatcgggaggcttgtcaattctggtgtgtgtgtgtgtgtgtgtgtgtgtgtgtgtgtgtgtgtgtgtgngagagagcgagagagagtgagagagagagagagagagagagagagagagagagtgactggagagaacgagagcccgtgctccaccgtctttggactacggagccagagtgagtcctaacctgcagttccgcggcgaccctcatacggcttatggtggccctcttcggggggatcctgacgttggggtttatacagtcccacctatgctaagaggcgcctgaaatatctcctccgggggagcggtcaggcggacgaagcgattgttacctgaggccttgtcctcgctgtttgtcttgcgtcaccggcacagggtgggacttcacacaatgggtaaatcggcttccaagcccactgtcttagagtgtatggttaagaattttaagaaaggattttctagagattatggtgttaagctgagtcctggaaaactgtgtaccctctgtaccctagagtggccctcctttggtgttggctggcctccggaagggaccttagatgtgttcacagttgcagcagtatataatgttataacaggagaccctggacacccagaccaatttccgtatattgatcaatggttggaaattgcctatttgaggcccccatgggttcggttctgcaccacagaccagggacagtgtagggtgctagtagcccagtccaagaagaaaaccttgtctcaaaagaaggtgccacctatttatcaaggggaacctgaggactcgccccctatgccaccaccttatgtgctgccggccccacctccgggagccgaaggtccccagatgccagatagcccaccgccttctgtttctcctcctccttctgcttctgaagttcccgaggcgatatcacccccgcagccagattctccagaacctatgagcaggcgtctccggtcagctcagggagcagccactccagcattgcaaatgcccttacgggagacacggggaccacggcaagtcgcccccgatgggaccatacaagaggggggacgtttttattattaccagcccttttccactgccgatctcctcaactggaaacaccatactccctcatattctgaaaagcctcaggcgctgattgatctcttagaattcattttccagacacactgtcccacctggatagactgccggcaactcctttttactctatttgacactgaagagcgctggcgaattgtaacagaagcccaaaaatggcttcaggccaatgcggggggtcgagcagacttggcaaactgggtgagggaagccttcccagaagaaaacccccactgggactatgacactgaagaagggaaacgtaacctagagaggtaccggcaggccttcctacagggggcaaaagctggggctaaaaggcccactaatatagctaagatcagtgagatactacaagagccgaatgaaagcccagccaaattctatgagagactatgtgaggctttccgaacctacaccccttttgatcccgaggcccctgagaaccaacggatgataaatgctgcctttgtgggacaagcccaatcagatatccgtaaaaagctacagaaattagaaggatttgcaggagagaatgccactaaactgttggaaatagccaacaaggtttttattaaccgagaccaggtggcccgccgtgatgcagaaaagagaatgaaacaaaaagtgactcttctggcggccgccctgtcaaaaccggtgcccccagtgggaccaccccgtaggggacaaggcacaaggccagggaaaaggagtcccctggaacatgaccaatgcgcttactgcaaagaaaagggacattggaaaaatgaatgccccaaccgtcctgagaaaaagaccaaggccccacctagccggtaccgatctgagccattcagcaccaacctgatcggcctagctgagtctgattaggggggaccaggctctctccaactgggcccccgagagcctatggtcagaattcaagtagggggccaccccatagactttatggttgacacaggtgccgaactttctgtggttacacaacctgtggctcccctctcggggaaagaaaccaccatcgttggggccacaggtaaccaaacccacaggcccttctgcggtcctcgacgatgtcggttaggaggccatgaagtaatacatgaatttctttacctgcctgactgcccagtccccctgatgggaagagacctgctggctaaaatgggggcacaaatttccttttctactgacggatcggcccaactcaaattgacagaacccccctctcctttaatcatggctcttgctgtaaaaagggaagaggaatggcgcttgtactcttccccttcagaaatggggaccattcccccagaactagagactaaatacccattggtttgggctgaaggaaacccaccaggactggcaaaacgccacgctcctgtcttgattgatctaaaacccggagctcaaccggtaaagctacggcaatactcaattcccagagaagctcgactgggaatccaggttcacctggataggctgcttcagcacggactgttaataaaatgtcagtccccttggaacacccctttactgcccgtgaaaaaaccgggaacacaggactaccgcccagtacaggacttgagagccataaatgaagcaacagtcacattacacccgtccgtccctaacccgtataccctgctagggctgatcccctccactgctgagtggtttacttgcctggacttaaaagacgcctttttctgcctccgggtggcgcctgccagtcagcccttgtttgcttttgaatgggagaatccacatacagggacaaaggaacagctcacctggactagactcccacaaggattcaaaaactctcccactctttttagcggcgccctagccgctgacctggctgaatttcctggacaaaaactgggctgtgttttgctacagtatgttgacgacctcttactagctggcaccacggaggctcagtgcctagagggaacaagagctctcctttccctactgatggaggcagggtatcgggtatcaaagaaaaaggcacaaatctgcaaaaaacaagtcaagtatctgggcttcaacatcatgcagggccgacgaatgctggggactgaaagaaagcaggcagtttgtgccattcctgtccctaccacccgccggaaggttcgtgagttcctaggggcagcaggattctgccggatatggatccccgggttttcagacctggccaggcctctgtatgaggctctaaaaggggaagaaaaggctccccttgaatggggaccaagccaggagacagcgtttcagacaatcaaaaccaaactcactgaggctccagccttgggacttcctgatgtaaccagagaatttaacctttttgttcatgagaaaaatgggatggctttgggagtcttaactcaagaatttgggccttggcagaggccagtggcatatctgtctaaacaaattgactcagttgcngccggatggcctccctgcctccgagcgctggcagctaccaccttgttggtgagagaggctgacaagttgaccctgggacaaaacctcaatgttaaagtcccacactcagttgtaaccctaatggataccaggggccaccattggctcacacatgcacgaatgactcaatatcaagggttactatgtgaaaatccacgggtaaaactggaggttgtacgaactctgaacccagccacttttctgccagatgaagcggggcccccagaccataactgcctggaggtactagatgaggtgttttccagcaggcctgacttgactgataaaccactccaaaatcctgacctggttttatatactgatggcagcagctttatggaggatggaaaaaggatggcaggatatgctgtggtatctgacttaaaagtgatagaagcagaggtgcttcctcaaggctggtcagcacagagagcagaattatgggccttaatcagagcactggaactcagccgagaccagcgagttaatatctataccgactcacgatatgcctttgcaactttacatgtccacggagccttatataaagaaagagggctcctcactgctgaaggaaaagggattaaaaaccaggctgaaatcttaaagctcctagaggcagtatgggaacctaaagaagttgcagttatccactgtaaaggccaccaaaagggggacgacccagtgacaaaaggaaaccgtagtgctgatgcagctgccagacaggcagcccggggacaacagccagacaaacctaaggtcttgctggccccagaagtgccagctgtccccagatattctccagaggaagaaaaatggataagggaggaaggaggaactaaaactaaaacggggtggtgggtcacacgggaccaccgagtttacgttccagaacagctggcctacaaactagtccgccaagaacatgagctaacccacatgggcaaaactgccttagagaccctactgggccggtactatctcattgctcgtcttcctgcactctgctcctctgtctcccaaagatgcataacctgtttacagaataatgcccgccaggggccccacagaccagctggggcacagcactgcggactgtccccatttgaggatatggaagtggacttcactgaggtcacccctagtaaggggtacaaatatttactagtttttatctgtactttttcaggatgggtagaggccttccctacccgaactgaaaaggcaagggaagtaaccaaggcactcctgagagacattattcccagatatggaatgcctctgaccatcgggtcagataacggaccggcatttgtggccgaaacagtacaacaggtggcaaaagctttacagatccgatggaaactacattctgcttatcgccctcaaagttcagggaaagtagaacgcatgaaccgaacccttaaacagaccctggcaaagttatgtcaggaaactggcttgccctggatagacatgttgccggtggccctcctaaaagtgagatgctcaccccgagcgggaataggattctcgccatttgaaatcttatatggaaggccacctccactaatcagtttaaaaggaaacaccagggagttgggagacttggaattacataaacaattacaaggactggggctcactatttctcggatacataaatgggtcacagacagaatacctgtgtccttaggtataacagtacacccccacaagccgggggaccaggtgtggataaaggactggaaaaaggagcctttgaggccggtatggaagggcccctatactgtaattctaaccacccccactgctcttaaagtaacaggaatagatgcttggatccatcattccagagttaaaccggctggcccagctgacgaccgtggagagtgggagactgccctcgatccggagagacctcttcgcctgacaatacagaggaggagacgacgatctcaaagccctgctctgaccacaccggaagctggtcagtcaacgcacggctgaagcttgaggaatcggctgcctggtaaaataaactgccttacctcccttccacaagagactctcttactgtcatatactgttatcttatgaccaacatgtatgtttgctgcctgttgctgttaatctggtcccctttggttctgccaggatccatttcctcatgtgacccgtgcattcgagtgacccgatcagatcaaggggttacatggactttgctttactccactcatttctcctgttccggagaaattcacggaagttgtactcacaacaggaccacttattctatctgtcaacagggggaccaatatacttgctttgatccacgatactcaccaactgaggaatggttagaagtccggcgctctcataaatcagggcagctaattaatcggacccaaattaccaaccccaagttgccagtatcaatactttttgatgcctgtgaagctatgaatgggtcatggacttctactagaccatgtggaagcccgtcatgggaaagagaatataggctccagcataaatatatgtgctgggggaccacctggagcggttgccaggaatgcacttactggagctgcgtggcctgggcaacctggaataagggagacaaaacagctgtccttcaaaagggtacagcccctccagactgccagactaaagcttgtaacccagttaatttcactattttcaattccagtgagcccaaatggaaggagggtttcaaaataagcattcgcattgacggaagaggccttgaccctggagctgtgctacatttccagagaatcacgtttgcgctccaagctgcctctcacagggtctttcattccttttatgaagagataagaaacaccccacctcccattccggccacaactaagaacttgttcttagccctggcagaaactattgcacaaactctcaaggtctcctcttgttatgtatgcgggggaacgaacacaggagaccactggccttggcaagccagagaactggacccattagagcctcataatgagactgcatacccccaactcaccgatggggtatggctcctcagaactgctattatagggagaaattgtcttgcgaggcggggaggacggtttaatgtttcagttggaagcctaacatgtttaggcctaaggtattataatctgactgcccaaaagactcaatggtggtcatcctccaatctctcagagcccaagcctaatcccctgtctaacttttcccaccttcgacaagcatgggaagatatcagtgctaatatccagtggcgggcaccaaagggattatattggatttgtggaaaaatggcctattccatactccccccaaattgggctggggcatgtgtactgggaacaatcagaccttccttcttcctgctcccgctgtcactaggggagcaactgggagttcctatatatagggcacagggtgcccagagagaccggagggctctccaaattggagactggaaagatgatgaatggcccccagaacggataattcaatattatgggcctgccacctgggcagaggatggctcttggggatatcgcacccctatctatatgctgaaccgcatcatcagactacaggcggttttggaacttataacaaatgacactgcaagggccttgactatattggcccaacaacaaactaaaatgcgcagtgcaatctaccaaaatcgcttggccttggattatttacttgcttctgaaggaggggtttgtggaaaatttaacttaagtaattgctgtctacaaatagatgacaccggaaaggtggtagaagaaattgctgaccgcatgactaaactngcccatgtacctgtacaaacttggaaaggatgggatgcagacagtctctttggtaaatggttctcttggttgggaggaattaagacaatggtcggaataatcatggttatactcgcagggtgcctacttgttccctgccttgtacctctcctgataaatattataaaaggttttataaaaaccatggttgaaagaaaaacagcctcccacctgctacttatcagaggctaccaaagggttatgactgatgatgatctgtaaagggtgcagatgcaccctgaacatcaagaggggggaa

SEQ ID NO: 314 - DNA, 8483 bp, Equus caballus
  misc_feature (7139)..(7139): n is a, c, g, or t
gttttgctatcgccggcaggatccccactggctggcaagttgctttctctggctggaagaactgcttcctccctgggaccactgcagatgaggagatcctgggtctcctgacgaaagctggcaaaaggtaagatttctcaccacgtcagcctcccagaatctctatctgcagggtccagtggaagcaagtggtgagaattgtttttctttctaaatttagattagcaggagaaaatatttgggaaactagtttcttgtgtgactctcgtaaatttggtagagtactcttggctttattgatccttttcctcccagagatagctactgtgatttttcttttgtttctgtcttttgtgtcgtgtgtcataagaaggaaataccatagggtaggatgcaggcataggccctataagcctgttttctggccagccccacaggctggtgagtttgcggtctcaccagaccggcatctatttagataaactttgctgtgggttaatatgcacatgaagtgaaagctattgctaagggcatcttggaagccaaaaaggctgcaaatttggtgggcacagctcaagcagttaagagccattaggatgctcactacctcaagaagtctccggtggaaggataagttggtcacggaatggggtagatgacacaggtcccccaccaacttcaagaaaatgtccatgcaatgacaaggtactctgtaaaacacacatgatccccaaccccacagcacctccctcctaggtattattctggctccaagagacccaaagcttagctaaagctgtcattctgtcattgtgcatataagaaaaaaaacagatgaggtttttccttccctcttgttctgtgtcctgagaatttggcttcttgaccagtgagaatattctccttggtctctaccatacagaaggtgcatttactgggtggccagtcaaatagactggggttccgagctctctctttgtctggctgtgccaagctctcaggggagtttgtcataaagggcccagtccataagggcctttgtcgtctcaaccttcgttgcttgatagtgctggaaaaatcccattccagtagcacctgcccagtgtcacagattagtgggtctgtgactggaggcgtcccacgctctcgtgggagaccggagacaccgttttcactacaccatccttaccgcctgtgcaatgaaggtctttcctttctctgactatctctgggagtgaacttttggatcatggggctacatcatctgcgccctctccagggacgcctcttgtgtccatggtaaagatttattctaagcctggaaagttacctctggatctttccttaaaaaggcttattgggttgagtcactattggaataaatatacaaatggagatcctactcgtcaatggccagatgacagatcttttgaattggaaaaacttctatatttgaaaaatattttagagagctctcataacaagcagctgccttattggtatttatgggaagatcaaattgaaaagaaaaccccaaaaaatataatggctagccttaaggaatctcttaataaattgaaagaacagaagtcagacttagagcaaagattaaaaagcaaatttaatgaaaattccccttctcctccctcctatgctcccctatatccccagctccctgtccctgattccccagaagatcttttggatctctgggcccctggttcaaaccctccccctcaggacttagctcctcagccagctcctcagccagttcccttagatcctagaatgccaacttctccaaagggcattcagctgcctgttttaacttctctctcttgaagaagacttacagggggcactcaggcctgacctccaagcgagaggcatacaggttacttgtgtaaatgctgaaagccaggaagtgaatttagtagaagcggccagaaaaagcagaaaggttcgctttgctgtcccttacaactcctactttccagggctctgtaatcaggctctgccagcttcaggggtttctatgcagtgtccattgcagatgtatcctggacctccgctgcagagaattcatgtcccctggacagcagctgatctattgaattataaaactctcctgcctccattgtcagaagatcctactaagtttagagaggaattagaaagattagtggctattcataaccccacccacagagatcttgactggctgctaaggggcgttcttccagcccatgattacactgtagttatcagacaggccagacgaccccctgggagaaaacccccctcacaggggaaatagatggccagaccctctcccaggccctcctgcaaatgaccaggaagtggcacaactagaggctgatattcaaggcttaataggagcgattttagaggcgtttcctcccaaagttaattggtcaaaaattgaattatgcactcagaatgaaggggaacatccaaaagcctttgttgaacgttttatacaaacttttcaaaggcacactgcattaaacccggaagccccagaacataggaatctcctaatttctgctttagttggaaactttcttcctgatataaaaaaacaaattcaaaatagtgtggttggttggtcagggcaaccattaagcgtaataatggaggctgctacacaattctttgaaaatagtcagcaggaaagcaaaagaaaaagagaattaaagacaactcttctcgctttacaagttgaatcttttgagaagcaaaaaggcaactctgaaagtaaactaaagcccactcagaggcctccctattggcctccagacaattgcaggtattgcaagaaaccagggcattggaaaagagaatgtcccgctcttaagagaagggaaaatttaaaaaatatccccgcttggccccagaacccccagaagaaaaagtctcgtttttctcctcctgaggggcatttctcccttaaatgatggggtcagccaatcctcagtcgcacccctgagcctaccattaaacttaaaatagaggatcgggaactggattttttagttgatactggtgcgactttctctactatccattcgaaggatttatctctacctgtcacctctgattctattcaagctgttggagtctctgggcagcctatttcactgcccatatctcagcccactccagtatctttaggcccccttaacactcatcatgcctttctggtctctgactgttcaccagcaaacctctttggcagagatttgttatgtaaatttaatgccactataaattgtaatgaaaaaggtgtttttatctccttgccctctgaccaaaccccaagtctcctactttccttgctagaaactcatcctgatttaaattcttctgaagaggatgagtctttaaaagatgtcccaattagtctctaggctacacatgcaaatgaggtaggattgttgcttagtgcagaacccgtgcacattacttggaaaaagaataaaccgtttccatcagtagcccaatacccgctctccagagatgcagagtgaggaattgaacccataatagactcccttttgcaacagggtgtactagtttttacttcctcaccctgtaacactccaatcttgccagtaaaaaaagaaggcaaatttgactcagatgggaaccaaatctatagatttgtacaagacctcagagccataaactcttttgtaattcctcggcatcctgtggtccctaatccagctgtcatccttgacctcaatacctgctgatgcagcctggtttacagtcactgacctctgctctgctttcttttcaatcccattgcaccctgactcacaatttctttttgcatttacatttaaagggagacaattaacatggactcgcatacctcagggatattgtgagtccccctcaatattttcccaagtccttaaagctgacttggattctgtagcctttactcaaggctccactcttgttcaatatgtgggtgaccttctactctgtaatcaaactgagcagggagcccttacagacccctcattctcctgaaggcactcgctgaacgaggccataaagcctccagatctaaacttcagtgggtgcaaacgactgttacctacttagggcatgagatatctcaaggcattcaaaagctaaccccaaaatgccttgagtcaattttgtccatccctctccccaaaatgaaaaaacagttacataaatttctggggcagctggttactgccaccaatggattcctaattttgcagcccttgctaaacccctatatgctcttctcccagatatcactccagagcctatttcctggccttcagaggcattaacctcctttgaagccttaaaattagctttgtccatgcctctggctcttggcttacctaattttgacaaaccttttcatctatactgtcatgaaaataatggaattgctgcaggcattctaggacaatcttttgcctctcaaatacgtcctatagcatatttctcatgccaactagaccctgtggcatcaggtatgcccccatgcttacgtgcggtggccgcagctgccaccttgattgacaaagccagtactctaacattaggctctcccattcatctctatgttccccatgctgtgtctgctattttgcaagtacataggacacaacacctctctacacggcaacagaccacctatgagcaggctcttttaaccaacccttccatcatcttacatcgttgtaacactttaaatccagctactttactgcccctccctgatgatggagagccccactccattccacatgattgcctggcaactatagaaatggtctcaaagccacgaggatctcttggacatccctttagacaatccagacttacttctgttttgtgatggctcctgtaagtgaaatttccagggaaacataataactggttatgccatagtttccccacatgaaacgcttgaagcttattctttgcccactgtaaaatcagcccaagctgctgaactcatagctcttactagagcttgcacattagcaaaaggaaaaactgccactatttacacagactccagatatgcttttggagtctgccatgctgttggcacaatttggaaatcccatggattcttaacttctgcaggaactcctattgctaatggatgcttaatagcagccttattacaagctattcacctcccttctaaaattgccattgttcattgttcagcccatactaaggagactgatgtcatatctttaggaaatgacagggctgacagagctgctaaacatgcagctcacaatggacccccttatcctttttccacccaatttttaaacctgcctttatccctgactgatattattaactatcaggcaaatgccccacaatctgaaaaagacaattggatacaaaagggtgccaaacaattatcagatggattatatattgggccaaatggacttcctgtagctccttttcttttgactttttggcttgcacttatctcccaccaaatgggacatatgtgcaaatggggaatagttaaggaactaaaagacaattggttttgccctggcatccataaaatttctgaccaaattatttcccagtgcactacttgcaaatcttaccaagtttctgggagaaaccagcataccccaggaagccctcccaggcccacactgccctttgcggcactccaaatggactttctagacttgcccccagcctttaggctactctcactgtttggttatcatctgcatgtttagtggatggactgaatgctatccgactagacatgcagatgccacaacagtggtaaagaaattaataactgaagttattcctcattttggcattcctttatggattgaatcagaccaaggaactcattttacagcagagataaaccacttgcttgcaaaaactctggggtactcattaaaatttcataccccatatcacccccagtcatcagggcaagtggaatgtaaaaatctagacataaaaaggactttaggaaaggtctgtcaagaaactggacttaaatggccagaagctctgcccttggcccttataaagattcaaaatactccaaataggagacatggattgactccttttgaaatagtttttggatgcccgatgcctactggcatctctaaaccttccattcctggattaagtgaatattatgggaacttaagtgaacaatttgatgctatgactagctatatacaaaaattaactagtatacttgaagcatatcgtcaacaggtaaaagaggcatggccccaccttctgacaagccttgccatccctttccaccaggagattgggtgtacatcaaggtctttagaagaaaacatgtactgtcacctcactgggaaggaccttatgaagtcctactgaccacctacactgccatcaaaataaaggaaaaatcttcctggatccatgcaagccacgccaaaatagacccagaacatcactctcaagacaactgggagacagtccccacaggtgaccttaaactaaggatttccagggccaattcccaggccccagaagcagctgacatcacgaagtagacagcttttcccaagatcacggatcaagaaagcttgctttcacctatttcctcccctttgcttttaaaaattccctacacacacacacacacacacacacacacacctattagtatatatatatattcctttaatcatttattagaaagctgactggagagtgctagtctctatctatcctacttcccctctctaagtctccactatgggctcttttccaacctgtgtcttgcttttactaaccctctctttttcaacaggtcgagcacagaccaaacacccccttatgccagtttaccaaaccttggccatgctaactaatcaatctgactgttggttatgtcaacagctagatagtgcaaaagaacctgaactagtctttgttcctgctgatgtgaacacctggtggactaagtayrgaagatggatgaacaacakggtatggtatccayracaaggaaaacttcactctgcctcttctcctggtgagtcacttgggccccagaaagnctctctagaagctcaaggactgtcccttgcccaggtaaagacaataggtgaatttttccctttgcattgamagtaaacatgacactggacctttcctgggtgacataccaggacaatattgcaatcaaactctgtggtttgattccacaggtggcatcttcaaacctctcaagggaattataagtgactctaacactactccccttggcacaaacatttgccaaatcaccaaatgttctggatggcttacgagccacccttgtacaacttggggtattgcagctgcctgcatggttaagctgcccagtaccacaaactatatatgggtggatcaaaaatctggactcacttggtcaggtgacaggaccaggctttatagctgccaaaatcagactgcaggcctcctgtaccagctattccgcaatctgttctgttctcacagattgacaggagcacatggaaaatggagatgtttaggcactaacagtaccagtggcataggtcatggaatactccagaccctgggaaccacagattcagttctaaccttgtctgtaaaccgcactggtctttttattttatgtggcaacaaagtatataaaggattcccacctaattggtcaggrcgctgtggactcggatacctggccccttctgtcaccaaatactccaccctaaatgccagccaaattgcaaacctgggttcctttgttcttaagattgtgccacataaacgtgccagtcgggaaattgtgaatcyacttgtgtatcacaactccaagttcttttcagcattgagagtcttattccccagctttggagattacgagttggaaaaggtgatcttaaatctctccatggtaatggaacaagagttcaacaccaccatgcaaactttgaaaatactccagtcagagattaacagcctagcctctgtggtactccaaaatcgacatgctctggatacattgactgcccagcaaggaggagcttgtgcaatcattggtgaaaaatgttgcttttatgtgaatcaaacagggcaagtagtatctaacttacatctattaaaagagaagattgacattttccatcagataagtgaagctcacacattttattggactgatttatttccaggattggggaactggtttaatggagtgtggggaaatgtgctacattttcatttgttcttttctgcttgtttatcctcattctaatctacgttcttttctctctttgcagatttcttaccactcggctactaactcgatttttctctccacagccaccagctcagcttttaatatgtgaaacttccagggaagtttcagaagagggaat

SEQ ID NO: 315 - DNA, 7977 bp, Monodelphis domestica
caatgctaaaattatcctttacagttttggctgaccacatcggttgtgatgaaataccctcaatcttcttaactttcctaaaccttttctctactgtgactatccctaagttcagcttttaatagcttattttgatcagctgtagaggtaagtaaatttggattttttyccctctctccttaaattagatagaatacagctgtttttctttttttttttttaaatccaaagcarcaggactgggaaagctgtttagctatgaatcccctttccctcagggaacaactgcctagattactcttaattaggagtgaaggggacctaaagagagttttggccttgccctgctccccacatgttttgtgaagcccactaggaaaataatttatatatatatatatatatatatatatatatatatatatatatatatatatatatatatatatatacatatatgaaatgaatactacattcttcgacatttatatggtggttgaagaattagggacattgaggaattcagcatacctccaattttttatattattaggtaatgtcatttttgtactcctcagtactgtgtttagagatgctaacaaaaaattatttgaagctgaaattcagaaaaacacacaaaattctgaagctaaaatacaagaaattatgcaagaatctgaagctaaaacacagaaaattataaaaaaatgcaagataaaacacaggaaattataaaaaaaatttgaggctaaaatgcaggagaacatacaagcccaattggataatttaaaatgtttttacaggatcaattggcaaacatccaccccaccagaaacaggtctggacatgacagacctgtttctgaacctctaaatgaggaaatttccttccccgaaatagagatggaaaacaccttccctatagctcagctaacagactggttctctcatggtctgcaaatcttggctgaacttaatccccaagacccttcccctgcaatcccagtttctcatgttccttctcctacacaaaacaacaaattccagcccaaaggaaatcttgtccttctaaagaaactcgtcttagtcaaactgacccacaggtaccaaattcaattagaggcctgtttcctctaagagaagtacctgaaataggatggaacagggatgtggtgactttaaggcacaatatactgtttactccccaagaaataaatgaatttacatgaaatattcccacatatgaacaagatccctttctagtaacaaaaaagatgacagacatattttttcagtataatccatcttacaaggacattgaaaacttgctacaggcttttttaactgaacgtgagaaaaataaaataattgctcatgtcaacaaaacccgggggcgcaatgcagcacattggccatctcaggatcccgaatgggactataatgactctgaggatcttttacaactataccattgtagagaggccatcctaacagcaatgagagagtgtgcagacagtacagataagtggacagaatttgaaaaaattaagcaaaatgaggaagagacaccctccagattcatggacagaataatcgagtttgggggtagatacctggattttgacctatctaaagaaaattgcataagacaagttagaaggcactttgtcaataactcttgcaaagtgattagggattattttagaacacattgcccaagatggccagagatggaccttgaagaattgcagaaaacagctctatatgtttcaaagggaaacaaagaaaaggaggaagaaaataatgatgtcatggaggaaataaagaattgagatgtttaaaagataagatggctaaaatagaaagtgggcatgatactcaaccaatgacacttgcccctctccaggaatctaattatcaatccattacctgccaattctgtgagaagaagggccacagaatggtagagtgtagaactttactcaaggttatcagaaggaatacacagtttaataacaactacagaagtgataattatagaaataactataataatgataatggaaaccacaactttaggaatgataactataggaatagatattgggaaaatgataactcaaaccaaataactccacaacaatataacttaagtggtgctcatccaaaaaatacttggggtgctaatgcccctcaggggggtgcccttcaggggggtgcccaaggaacttcccaaatacaatgaaggtgtctggggggctggggcacaggaatcagaggatacaacctttgattttctagaccctgatgtcctactacccattgtccctatccactgcccccccatactaatgaaccccatgttaccttaaaggtgggtaacacctattatgattgtcttttagacactggagcttccaggtctgtattaaagagtacacctgatttacattgttattctgttggctcagagaatgtaatgggagtgtcaggaataccccaaagggttaaaaaactttcccctagaatggtgtctgtaggacccctagaggtacaacattccttccttttgatgcctgactcccctttaaatttgctggggagggaccttctatgcaaactcagagccacaataacttgctccccagatggttccttatcattggaagtacctgaggaatctttaaatttactccctgtaattctctcagagagtcaggaggggaaagagcatcccacctttgtaatacctgaagatataccagagtctctttgggccacatcttcttccaatgtaggcttacttaagttggctgttcctgtgcagataaaaactaaatctagcccacctccttccattcctcagtatcccctctcaaaagaggcaattgagggtattaccccagtaataaactcattaattgatcagggaataataatcccttgtaaatctgaatacaacatgcccatcctgcctgttaaaaaaccaaaaagggggcccgatggcaagcacctctatagattcgtacaggatctgagggctgtgaacaaccatgttataaagagacactccgtagtttccaacatacatacgattatttcttctattcctagcacagctacatactttacagtagtagacttgtgctcagccttcttttccatacccatacatgagaactccaggcatatctttgctttcacctggaagggctctcattatacatggagtcatctgccacagggttacatggaaagcccaagtttatttgcacaaattttgagccaagacacagataatataacatttaaaaatagcaaattaatcaaatatgtagatgatctactcttggcttcaacagatgcagaagcatgtcaggaagatagtaaacaccttcttttggaattgcacaaaagaggacataagatctcaaagggtaaagttcagtggtgtctccctaaagtagaatatttggggttcatcctgactgcaggtgcccgctttatttctcccaaacraattgagaatattcaaaatttaagcactcctaccactaagaaacagttgagagcaattttaggagcaacagggttttgtagacaatggattccttgctatggggaaattactaaaccccttatagcactaacaagggattcagtccctgaacccctcaaattagagccagaacacctgtcagctctatcagatctaaaacagrctatcctgtctgccccagattacaacaagccatttactttgtatgtacatgagygaagaggggtagcttcaggtgttttaactcwgactttggggccttctcagtgcccaattgcttattattctgcccaactggacccagtagcatcaggagcaccaccatgtcttagaggagtagctgttacagccttactagtgacaaaaactgttgatctagtattaggatgcccattaacaattatgtgcccacatgaggtagaagcattattgctaaggcatagaacacaggcattctctgatcagcgaattacaaggtatgaaataaccttgttaaatagcgaaaacattaccttgaaacgctgtacaacccttaaccctgccaccttgcttccagatttaccaacttcaggagaaccattacacagttgtgaaacactagtgtccatggcagaaaagcctcaagataatctcttggacactcccttagacaatccagatctggtcttatttactagatggttcctcttttatgagggatggcatacgctacactggagctgctatagtcacagaatttgccactgagtggtcagcttcactgccctctaatattagcactcaaggggcagaactcatagctctgaaacatgcctgtataattgccaaggataaaaaggcaacaatttatatggattctagatatgcttttggcatttgtcactcagtcgggatgctatggctccagagaggatttttaacctcagctggaaaatctatagctaatgcagaaattattaatgaagttctttctgctctccagctgcctgaagccctagctgtagttcattgctctgcccatacaggtggcactgaccttgtctctaggggaaatgattgagcagatgccactgcaaagctagcagccatagaagggcctgaattaattttaacattaacaaccactgatgacttaaatttatcactttcctataatgaaaaggaagtggaaaaatggaagcaaaaattcaaagcaaaacagattaatggagtatgggtgtcatctgaaggaaaacccctgctccctagaagtttctatcaccaaatttgccaatctattcataaaaatggtcactttggcacccagggcatcgtggactctgttaagagagtatggatagcccctggtataactactatagcctctaaagtgtgtacagcctgctctacctgccaggcatataaccaacatgcctttcatggcaaagcctttggtgggcatcctctggcttacacaccttttgagtacctacagatagatttcataacaatgccaaaggctggacattataaattttgtctagtcatagtagatcaactgaccagatggccagaagcatttcctgcgacccgagccacagtggcttttgttgctaaggtgcttttaaaagaaattattcctcactttggcctgccagcacgtattgattcagatagaggaagtcattttactgattctgtcctaaatcaaatatattcttgcttagggataactcccaaattccatgttccatatcatccccagagctcaggccaagttgaaagaatgaataaagaacttaaaactatgattggcaaattatgcactgagacacatttaaaatggcctgaaattctccctctggccctattttatcttagaagcaggcctagaggagacctacacatctcaccatttgagatgctttttggacatccacctatacaggctaagcctttctcccctgcatatacatcactattagggggagatactactattgcttcctatatacaggaattacagcacaaactacgtgaactccatgaatccggagctgcagtacaagccggaccactagacttttcacttcacaacctgaacccaggagacaaagtgtatattaagaatttccagcgtactggagcaactcagccttcctgggaagggccattccaaatattgttaatwactccagaagttttaaggaaggaaaagaaacaggatagaagttttggatcccgcgaagggcgtgaacgagccggctttagagatgtaaataagagtcagtaatcaattattgatattcgggagcccagcctactccgaccactacgttactattcaggctattccgatccaatgatcccaatttaacactgcactggtcagaggataatgctagctcagtaggaaaggagattagaaactaaaggaggtagataatgctaggtattagcattggataagagagagagacaggaaggcctgaccgaagcgccaggcctcagggagaaagatagagacgagagagaaagagaagagttgctcctttgaaacctggacgtcctccaagtgcttgagctggctgtgtcccgtttcttttactttgatatacaaatgagctcaatacatattgatcaattacatgatgcctcaataatatggatgagttacatagtgtattgccattggataattgcaaattatgacaaggtgaaggtggggttattatcctcaggtgagtgagacaggaggaagcaaggcttcacgccctaacctcagccacggggaatagagcccattgccatgcgcagggtggccatgtgctcactcacaatccttgtctctccataatatatggggactgctacatctaactactccaacatctataaagattggagaaaaggactcttggattcattgctcacatgtaaagagagcatcttctgttgagactgattgactatatcctatcacattgcaytggagataataatccattgacaagtggatactgttttcaggaacacattgaattcctgatttccccccttatttttattattgctttccttttattttgattagaatatttgattttttccccttttctcatttcttgtacttaaggtacatacaatcaatattaattttattctacaataatataagtttaaaatatatgtatatatacttgctataatattaatacatacccagctttaaactgtgggaacctgacatttattgataattgttatgggactgtgattaatgtttgtgtctgattctaggaaacaggatcaaaaaggagcacagacttaacctgaatagtgccaaaagagcacacaggtcaaaaaaaagaaaagaaaaaaaccaatccaggtaggattagtgcacttctaagccaatacaaaggatttgaacctagtgtgagactcaaggttgcaatgcttgacatatgttaagacataagccttccttgtatccacactctttgtgaaaatacttacagacaagtaccaaaatttggctatcatcctggctccctctatccctgagaatgaaggaaaaatcagacgagggaatgacacttccctatcaaaataaaattctagttccttttcttcttatagtatggcaacttcctgtagtcttggctgcaaatgggtaagtgaaatattactgcattctgtcctacagacttgtgggatagaaattactttaaattggacctgtacaagggcctattatgaatttattcttgcttactcaacattttatatacatagattttggtattttgattctgattttgaattttttttctttctcccaaaagtttaactttcttccattttttcctttatattttttgttttgtttttttgtttttgttgtttttcaattcttttaataattgactcatacacctccataactcaaccatgcatcctgagctgaactggatgttttttaacacccacttcaggggggggttgtattttaataaaaatccaagattttgaaattttttgttcgagaaagatcttcaaggaagaagcttgataactcctaaatccagagaatgaactgttgcagaaagatgccagaaaacctacactacatcaagaagatcaagaatgaactttgggtgtggttgattgaactgaagtttgattgaacatttattgtaaatgtacacttttatgccaaaggggactgcccctaatttggctttttgtcaatgcacctagcaaaacattggttttgctttctctcttttctattcctccctaactattgtaatttcctcttagaaatcgaatattgtatatatctgtagttagaagtattttaggactacaagatgattatgttaaatgatcaatggggagactagtctcccaatgatcatcaggggggattgtgaa

SEQ ID NO: 316 - DNA, 6976 bp, Procavia capensis
tctggcgcccgaacgtggggcacggagggtaatctcgccgacgccacacctctcttaagggggtagtggataggattccgtcttgtaactgatgggacggataatcattcgggaaggcgcggaccctactccaaagtgacggggtaggaagcacagaaccgtcgacgctactcatctctcggcaggaacgagggtaagcaaagggattcggggtagctagactcttgtcctgaggatctgcaggcctcctcattcatatgagtaagtgacgggacaagtaatcagaacttgagatgtttgtgccataaagaattccaaaaagggaggattctttatagttatgaggagcgaagcttacgtgccataaagagttcaaaggaattctttatagttatttaagagcgaagaattgtgccgtagagagcctaaagaataaagcagactctttacagttaagcttaggagccataaggaattccaacggggagaattccttatagttatttgagagcgaagaactgtgccataaggagttctaaaaaagaggattctttatagatttttgtaacaagtgaagcttatttgccataaagaactctaaaaaagaattctttatagttattgaagtatgaaaattgtgccgtgaggagtctaaagcaagagaagactccttacagaaacctctctgtaaatatctttcttactggaatctaatctgttattctctgactgctctcttctcctcttcctaaatagctgcggctcctttaagaatcagggaagacacagggtcgatacctgaaaaaacctgttgagataaccgccagcagtagcagtagccgtgttgccgcagccacggggatttaaaagaacaaactgctcggtttttttttctctgctcacaggcgcctctaaaggcttttacatcagcagcagccgctgccgcggccactagaggatttaaaggaactggctatctgttttctttccgctatcagcctcgttgggttctcgcttgcctctgccaggcgtttctccaggagggtacctcttttttgtactgtttggtattaagggacgattctaatccagagtcaatacctgaaaccgtttgggaatctcttcttttctagtttcttagcaaaaagttgtgtgccataaagagttctaaaaccaggattctttatagatttttaacaaacaaaaaatcatgggtcgcaaagagttaaagcagaggaaactctttgtaaaagtgattaagaacctcttatgtcaacaaaggattaagatttccactaaagatttaacagttttcatggattttattcaaaagtcttgtccttggttcccggttgggggtgcactagataaggaaacctgggaacgtattggccatagcatacaaaaaatttaccacgaccaggggccggatggcgttcctataagtgctttttcttattggaacttaatatactgctccctacctagtacaggaaattcctcctctgagcttcctctcttaatatccaaaacccccttgaaagaggcagctccttctaaggtccctcaacaagcttatgcggtgcagcaaacttctgactcagagtcagaagctgaaaagttggtcaaaccgccactgccggcaagagtaaaaaatcaaaaggaacagtctattcacttgcaagcagatgcagaggatttaaaagaacagactacccattctctctctgcgctcagccttgcttcccccaaatcgcgacggcgttgccctcgccccccgcccgctacgacagtgggcttccgtggtgccctccatcaggcatctctccagggagacacctcttttttgtgttgtccagtgttatatgatgcacctgagtgggacaatgaacctgtatggcagcccctcccttataagcttattaaagaaatcaaacaagcagttaaggactatggtcccacttccccttacactttagcactggtagaaggtctaagtggcaaatggatgactccttatgattggcatcaatctgccagagcttgtctgtccggtggggattatttattatggaaagttgaatttgaagagtcggccaaaaaggaagtcgctgcaaaaaaatccgaacagattactctagacatggttttggggcaaggtgaatatatcactactgctgatcagcttcagatccctctagaggcattaactatagtaacctcctgtgccttgagagcgtggcaccgcctgcccacaaccggaacaaaagcgcctggcattgtaaatattcgccaggcagctgaggaaccttatgaaaaatttcttgctagacttgtggatgctgtagagaaggtcatttccaatgatgaggctgcagaaattttaataaaacaattggctttaatatggaaaaatgactctcctgtatgggtggaacagtggcccttatccagtgaaaaaatttgtgccgcctttgagctggttcagcagcagctgcaagcgggtcacattgagccttctactagcccttggaatactcctatttttgttattaagaagaagtcaggcaaatggcgtttattacaggatctaagagcagttaatgcaactatggaatccatgggggcactacaacctggacttccttccccaaatgctgtcccattaaattatgcagttattgtgattgatctacgagactgcttttttactatccctttacaccctcgagacagacaacgttttgctttcagcttgccatcagaaaacttcaaacggcctttccagcgttatcagtggaaagtcctcccccagggaatgaagaatagccctacactctgtcagaaatttgtagatgctgcaatagagaatgtcagaaaacaatttcactctgtttatctcattcactatatggatgacattctgttagcccaccctaatcgttcctttttacaggaatgcctaatggcactcacctctgcccttgaagctaaaggcttggtaattgccccagataagatccaaactcagcctccaatttcttacttgggccgtgtgttaaatgacaccacagtaactcatcctccttttgtcttaagaactgctcacttaaaaactttaaatgatttccaaaagctgcttggtgatattaattggctacgatcgttgttaaaattaactactgccgaccttctccctttatttaacatccttaggggagatcctaaccctacttctcccagacaaatcacacctgaggctcaactggcacttaaaaaggtccaacaggcgttgaacagtcaatacattacccgcttagactatactagactctggtcattaatcttactccatacgccacactctcccaccggctgcctttggcaggatggacctttagagtggctacatctgccttcactaagtcgtaaggtagttgctgattatccatctttaatggccactctcctaatgaaggggagacgaagagccagagagctcttcggccttgagcctccctgccttattgtaccttattctaaagaacagctgcagtggcttatagaaagtcatacagattggggaatagcagtttgtgaatacaggggagaaattcaatatcatttacctgcaagccctcttctgcagtttgctcaaatgcattccttcatctttccacagctaactagccttaccccgctagatgatgcagaattagtttttactgatggttcttccaatgggattgcggttactgttattaatcacactgttgaccgaattcggacttcagaaacatctgcacaaaggactgaactccttgcagtatgtgcagttttttcaaagctgtatgacaaaaaattcaatctatacactgactcccaatacattgtcagactatttcctcacattgaaactgccacattatatcctacaaagggtactgtcatagttcttttacaatctttacagaacttaattcatcaaagagctcttccattttttataggacacattcgagcacacacagctttgcctggacctcttacagagggaaatcgtttggctgatgctcatactcgaattcaaatcctcccggcttttattaaggcatctcacagtcatgctttacaccatcaaaacgccacagcccttcgccttcagtttcagctaacgagagaacaagcccgttctattgtaagaggttgcagtgtctgccctactcagcaatcctccttaccaatgggaattaacccacggggtctgaaggctggacagctatggcagatggatgttactcacataccttcctttggaaaactctgctatgtccatgtatgcattgacacttattctcatgtgattatggcttcagcccgcacgggagaagcttataaagatgtaattcaacatctcttttattgttttacatattgtcagattccttcccatctcaaaacagataatgctccggcttacacctctaaaagctttcaaaagttttgcaacacctttggcattaaacacaccacgggcatcccatataacccccaaggacaagccattgtcgagagggcacaccagacactaaaaattcaaattaccaaattacagaaaggagaatataaacacagttcgccgcatcatttattaaatcatgccctttttgttatcaatcacttgaatttagattccaatggactgtcggccatgcagaggcactgggaaggtcccagcaaaaccccacacgtatgggtgaagtggaaggaccttttaacaggccaatggaaaggtccagatatattactaacctctggtagaggatatgcttgtgtttttccacaggacgctgattcccctatctggattcctgataggctcattcgaccacatggccaacccactgtcgttccggagacgcagccagacaccacttcctccgggaagtccacttaacaacgaggaagccactacggaggcttcatgcaattggtgcccaccagctcccccgtttcctccacccccttatcaattctcttcagatattaccacttctttctcccaagatttttcccgtctagccatctcttcacgacaccatcgccgacaagctcgccgcacccgagaaacacgtccgccgacttggggacaaatcaagtggcttgctgacaaggcaaagcagctgttatggtcacagggcgcgccttcatcagcagaacatctttttattgcaatggctgctattctcactgtagaggtattttttgtccctgtagctgcagtcccttattggactttcattcctgaccctcccttattacacccagtcccatgggacttcgctgacatcccagtcttcactaatcatacagcgctcctcgggggggaagaagatagctacataatggccaaatatacctccccttttaactattctgggcgcagccacgctccccctatttgtgccagtactcatcccaatgtagccataacggggtgcatccccctatactatgatggattgctggctgatttccctagacatgactttacaaaaagggccgtacctcgtcttctatggtatatatatttaagactgttggggaacccttttaaatccagcgcttccccacaatctcttcctccaagtcagcttaaaccttgcaaaaatgccctagaacagaaagaccattggaaaccaataatgaatggagaaggatttcccacctggttttcttgtatctttcctaaatttggagttaaatataaacaggccaatagatccacaaatattcttgactggtctgtctcccatacctcatttaattacttagatctaaaagctgacagccctgaattatttaattggtttgcctccacccttccaaacacaaggctcatacaccgctggtactcacccggatgggtggcccccatatacaaaccagggaatgtcaatgttctccagacaggcctgtatagattgtttgcagctactggtcctattgccctcataaatccacataaaacaacccctgaaatgttcagcatccgtgcctgtgttccctctccttacgctataatatccacgggtcctaatggctttctctctattgtacctgaaaaagatactgtatttgtaacctgcaaaaattgtatattaagcaattgtttaaattcttccatgtcaccccttacctttattattgtaagacaacccccttatgctttactgcctgtagatctcacaggagaatggtatgaagattcaggtttgcatgctttacaaatagtaacagattacctcagtcgtcctcgacgctttgttgcagctttaatattagggataactgctttaattggagttataacctcagtgactgcctcctccatagctctttcaaaagaaatccatacagctcattatgttaataatctggctagaaatgtctcactaacattagccacacaagaaattatagatagaaagttagaaaataaggttaatgcactagaagagactgttatgtacattggcaatcagctacacaatttaaaaacacgcctgtctgtttcctgtcataccaaatacaagtgggtctgtgtaactccattatcttacaacaagacagaccttacatggccacaggtacaggcccatctacaaggagtctggagtgactcaccagttgcatttaacataacacagttacatgcccaaatacaagccatcagtcattcaaccttgcaaataacatcagctgaagaggttgcatctaacttcataaatatgtttaaaaaggccttatccacagaatcttggagctctcttttgataaatctgggcatctgtgctggcataattctaatattgctttttctcttcccagtcatcctccgacaactcggacagaccataaggaccatacaagtggaattacatgcgctgaagctaaaaaacagaaaagggggaga

SEQ ID NO: 317 - DNA, 7757 bp, Spermophilus tridecemlineatus
  misc_feature (3286)..(3286): n is a, c, g, or t
  misc_feature (7060)..(7060): n is a, c, g, or t
agtggtgccgagacccgggagaaaagaaaaaaagaaaaacccaggaaccagaactttcagcagtcagggaggcgcgccggtaagtcccaggtaaggtgggacccgctgttaaaaagcggaggctcctctatacataaagagggagcgttaaaaggtacctgctcctctgtaaataaagagagggcgttacatctcatagcaattgcactctgtattttcgttttgttttctgtgtattttcgttttgtttttgtgtactttcactttcgatttctgtgttttcttgtgttgcgtcatgggtgccgtgacttcaagtccacttcttctggccctagatggccttttacgttccaagggactggaggtgaaacgcagtaccttagagagatttttacagagggtagatacagctgcaccgtggttcgcattttcgggcagcctcactacacccagctgggataaattaggcaaagaccttgattttgctcgtgagcagggcatgctagagggcggggtgatacccctctggaagatggtccgtagttgccttacggatggcagatgccaagaagcgcttgttaaagggcaggaagttttagaacaattgcatgaggaaaaatcagaaacaacagagagcgaagtgtctcaggaagaggggagtgtgcggggcgtggagaacgggaggagactgtatccagatctcagtgtgctgcgcacgcccccatgcgaaagtgggtcagaggtagaagataatgaagaggaggagctggagacgctgtctcggcagctagggagtttaggtacagggaacagagataagcaagggctcaagaacggacggcctcccgatccgcctccgtatggcgggggtgtttcgggacgaagtttccacgcccaaacatggagggctgttaacgctgagatgggtcttgcttatccagtttttcaggatgataataggggaagatttcatgagcttttggatttcaaaattgtaaagaccctggcggagtctgtgcgcacttatggggtcgatgccgcttttacactaactcaggtagagaatctgtccagatactgcatgactccctctgattgggctagcctcgttcgggcttgcgtctccccaggcaaatatttggactggagagcatttgtgctagagggcgcagcagagcaggccgcccaaaatcatgcagcaggacacccccattgggacaaagacatgcttttggggcaagggagatttgctaatcaacagacaggatttcctcctgaagcatatgaccagattaataatatttgcattcgggcatggaaatcacttcctaaatagaggagaggtgtctggtaacctgactaaaattatacaaggccctacagaacccttttcagattttgtagcaaggatggtggatgccgctggaaagatttttggagatcctgatagagccatgccccttatcaagcaattggtttttgagcaatgcaccaaagaatgtaaagcagcgattactccttataaaaataaaggcatagaggcatggatgaaggtgtgtagagagcttggaggacctttaactaatgcaggtcttgcagctgctgtccttcgggttacaaaaaggggcggttctggtgccggaacatgcttccgttgtggtcagcctggtcatctcaagcgtgaatgtcccaaaaaagacaatttcaatggacctccccatggtggcttttccaatggccctcgtttaccggggttgtgtccaaaatgtaaaaaggggaagcattgggcaagagagtgtagatcagtgagggacatccatgggcagcctattttaactgggtcaaaaaacggccggaggggccctcgaccccagggcccgcaaatatatggggcaatggagaatgtcacacccgaacccgagacatggccatctctacgccatcccatgagacgcggagagccactacaggtgcagcgggattggacctctgttccacctccagactcgtattaacacctaagatgggagtccagttggtagaaactgagttcaaagggcctttaccacctggcactgtgggcttattgattggacgtgcttcctctattttacaaggtcttcatgtttttcccggagtcataagccctgatactgtggggacagtaaaagtcatggtggaagctccaagaggcattgtgtctatctccccaggggatcggattgctcaattactaattttgcctagtttacataaccacttcccggctgactcacggtcacggatgggaagtgagattggtagcactggagggaattgtatctatttgtcactgggtatgagcaaccgccccaccttggaattaatcatagagggtaaatctattgtgggactgctggatacaggagcagaccgtagtattatagcccttaaagactggtctaagggatggccagtacagacttctgatcaatccttaaggggacttggatatgcccaagctcctcaaattagctgcagacatctatcctggaaggacccggagggacacagtggtacctttcaaccttatgtgcttgatttacctatttctttatggggccgtgatctgatggaagacatggggttcacccttagtaatgactattccctaatgtctcaacagattatgcaaaatatggggtataggccaggtctaggactaggaaaacatctacaggggcgtaaacaccctgtgcaaggtcatcaaaaacttgacagattcggtctgggtttttcataggggccgctggggctcaaatacccataacttggctcaccgaggagcctgtttgggtgcctcagtggccccttccctcggctaaactggcagcagcccatgacctagttaaagaacaacttgacttgggccacattcaacattctacttctccatggaatactcccatatttgtcattaagaaaaaatcagggaagtggcgcctactgcatgatttacgagcagttaatgctcaaatgcaacttatggggcccattcaaagagggctgccgctgctttcctctgttcctcagggctggcatatcattgctattgacattaaagactgtttcttttctattcctttgcatcctaaagactcacagcgttttgccttcacccttccctcgtgtaatcacgaggaaccagatcaaaggtttgagtgggttgttttaccacagggaatgtctaacagtcctacgatttgtcagatgtatgtagggaaggcactcgcacctctcagacaanaatatccttccatcaagattattcattatatggatgatgtattattggcagccaaattagaacagtcagttaatgaggcctataaagacctggtgaagttgttagctcagtatggattacatattgcacctgaaaaggttcaaacaggggattctattcagtatttgggagcgacgattggatatgacatgttaaaaccacaaaaagttactataagaactcaagatctccaaactctaaatgattttcaaaaactgttgggagatattaattggataagaggttatttacatattcctaatatcgtgctccagcctttgtatgctattcttaagggtgatccagatcttacttcccctcgtaccctcactaaagaggccagagcggcccttataaaagtagaagaagctatacaacatgctactctatgcaggctccagagtgataaacctttccagttatgtgtgcttgccactatgcggcagcctactggagtactgtggcaagatgggcctttactatggatccacccacatgtatccccaggaaaatctttagaatactatcctgatgctgttgcagcgttagcacttagagggattcaacagagcattcaatttttcggacaagcaccttcttctcttatcataccctattctaaagttcaacttaatgttttgtgtgctactctagacaactgggccattctatgttgctcgtttcaaggggatattgataatcattacccttctcatccattactccattttgttaaagagcatcctatcattttccctaaagtaacttcacccactccaattccgggggctgttaatatttttactgatggctctaagtctggaatgggagcttatgtgattaatgactctccccctgtccagcatcaatttgctcctggaaatccacaatgggtagaactacaaattgtcattgaagtttttaaacagtgttcttttcctttcaatctcatttcggactccatctatgtggtgcaggcgctcaaaattctggaggctgtaggagctattagtgacacccatactgtgtctgcttactttaatcagcttcaacagcttatccgtagccgtactgcccctttctatccaatgcacattcgggctcacacctctcttcctggcccgttatcacagggtaatgcctgtgctgactcggcaactagaagccagttggtatgcttggcctcctccttagaagaagctaaattgtttcatcacaactttcatgtcaatgctatgacgctgcgcagacgtttttccatctccagagcggatgctcgtcagatagtattacaatgtccccattgtgtcacatttcttcatcctcctacttatggtgtaaacccacgaggattgaagccattggtcgtctggcaaatggacgtaactcacgtgcctgactttggtaacctcaaatatgtacatgtttctattgacacatactctggaattattcatgcttctgctttatcgggagaaaaggcacgtaatgttattactcattgcttagaggcatgggcagcatggggtgcacctgcatcccttaagactgataatggacctgcttatactggcagacagtttacatctttttgttctactatgggagtacaacttgctcatgggttgccttacaatcctcaagggcaaggcattgttgaacgtgcccaccgcaccttaaaagaaaccttagaaaaacaaaaagggggaataggagttgaccacactcctaaagaacgcctgtccttagctctttttaccattaattttttgaatttggatattcatggccgctctgcggccgatagacatgtgtcccctcagccctctgtgactggctatgttaagtggaaggatgttcttacgggccaatggaacggccctgaccccgtgctgacatgggcacgaggatctgtatgtgtttttccccaggatcgcacggagccgctgtggatccctgaacgcctgacaagaagagtctcgagatctactaaccagcagcaggaggtgccacaacagtcccatgatgaggagcttcattctgatgagtgctctggctctgatgctggtgccaacggtacagatggcaccaatgcagtggtgggcagtggcacgggcatggccaatgccaatgccagttcatagtaattctagtgtcctccccactcttttttctacctcatgtgagatgtctgctccttgtacctctcctagaggggacatggaaaatatttttaatcagtctcaagttaatctcacaggagttttttgtttcagccttgggaacactaattgtattagccttaagaccaaaaatttgactaactgggaggacccattgcggtccagtcgagtctcagggagtattctcagtgctgtattgagccaagtagtttcagggaagcaatcaggctcagggacccccgcaactagctctgttttaaacataactactttagctattatctccgaggtattaatcccaatgcctccttcttctaatagtacttgctatgccactcatttcaaggcctctccttactgtacccctaattttggttttcccccgacatttacgccttgtcaggatcattcttgggagaaacatcaagttgctaaaggtttctccttttccccccctctgaagagatatgtttataactttaacaacaatgccaactcctctacaggaacaggttggtcctggtttcaatggctcatttccaatgagaagggggcttcagccgatatttccgcattggctcaattactaggagccaaaagttggctggctaatgtttctggcactactaaggagagtgaacgaggtaataggcttacatctgtttcgttcaactctctgttacattatgccacattgcctcctgcaatggtctgtatccaatccccgttcctgttccttttagctaatcacacctcatcggggatgctggattgttctattattacctgtttcttatctgagtgttggaatggttcttggactgtagcagtgattatgaaaattccaacttttgtcccaatcccagtcactgcggatccagataaatttcctattgtagagctacttagagtccgcagagattttggaatcacggcagctatagtgacagccgtggcggcatctgctgctgcagcagttacggccggagtagccatggccagtcaagtacaaactgctgccactattaatcaagttgttcaacaaacgtccactatacttgaatcgcaaaatgcgattaatcaacatattttgtcagggattttagctaccaaccaaagaatagattttcttcaagctcaggtagaggaattggctgacctagtacttttaggctgcattgaccaacgtgcacatttatgtataacctctgtcagatttaatgattccaggaatgcttcccacatcattggtggatatctggccgggaattggtccatggaagcggaagacatgatccagtctcaactaacccagatagctgtcttgaatagtacccgtgtcgatcccgtgactctgggtcaattcaccaattggatatcttctgctttttccttttttaaagagtgggtgggagtaggcatttttggtgcactgtgttgttttggtatgttcctctgtttgtggtttctctgtcgccttaaagctcgtagtgctcaagataaggctatgatcatacaagctcttgctgctttagaaactggcaactcgccncaggtctggcttgcgcatcttaagcactaaacttttgacatggtcattgcaccccaagttattataacattgcactgggattgacatgtctttcctcgttattctcttagtgtcagaaagcccttgcactctgccggtcttgctaccattgcacgcagatgggtttctacactagtgcctttgacatggtcgttgcaccccaagttattataacattgcactgggtacgacatgtccttcttttgtctttctcttagtgctggaaagcccttgcactctgcgggtcttgttgccattgcacgcagaagggtttccacactggtctttatctatcactttaaagtccgtgcctttctttcagggtgctgccaacttgtttgtagttgtacttctgcacggccacagttcaacctcagctattccctcttactcaccatcgtcacgatacaggatgcgaggcaaggcactgcacttgagtgatccattgagaagagggacctcaaggggagcatgtcctattgcatgcgggtttgacgtgtctccgccccgccccacgaaaaaaggcgtcggctgatatggtgtcaggtctggggaaggcgccccctggggctggcccatactatgcagccacttttgcacagtgggataggacctctactctcgcctgtattgtcttagtgaaacaaaaagggggagc

SEQ ID NO: 318 - DNA, 5321 bp, Monodelphis domestica
atttaaacaacaaatcagaatgtaatgtttatgggaatattggtacttgttaagaatttgcactaattgttgcatttatagttgtgtaaaagttttacaaggtcaatcttggtcaacatcgagtagggaaatggaaatcatttttgaatgtcaattctgacatgacacattggctcagctacagctatgccacatgaaaggtgagccattagtttaaaattttgcattcatttcatggtcattttccatgatcattttctcagattatttttcccatatattttctttgaaatactagaagtacattgtaagtactactaatgctctgatcctgatatatgaatcagaaattttatttttggacatacccataaggcttatataagaaatatgcagccaaaagttgccatgtcacttcattagcttcattcttgttgtttcaacaacaaatcaaaatgtaatgttcatgggaatattgatacttgaattgatgtttgtactaatgtttgaaaaatgtaaaagatgctcatctatttggtatgctattcaaaaaatggggggggggagaaagagagaaagtatttttaagaatatctttatccattcttatttcaattgagcaattgggatttgatgctcttttactttattttctctgaatattttgattatcctatgttgtttttcttttcatacattttgaagtaagattattttcttattacttttttatcattatttttaacctattatgagacttttatctttgattttgattactaagtatgaagatcattttcatcattatcaaattattaataagttgagagtaaaatcttcattgttgttgacaatcacacttactttttacatccaaagtttttgcaatatgttttggttgtctattttgaatcacttgaagtatcatttgatgatgctacatgatttttatatttttaatttgagtcaaatttttctcgtatttttatatcactcgcccttcatcttatttttttaacacaaaaaggggggatatgtagcattccaagcatattcacatctaagaaatataactgatgtatggatattgtgtcttcagacacaaggttggaactctgacatttgtgggtggactcttgacctagccatgcaaactcattaacatttggtgcattgacatttggtgaggactccaattccttggtaaaagggcgggttgaggtcaacacacccaaaaggtgtcatcattaccttcccatccaatctgaattatctatgctttgttacctggtcattgatcctggctatccccaagaaagcctggggtaaaggcgtgattccctctcttgttccagcaatcttaaagcttcactactgtctctttactaaggcctctcttggccacctgtcttacttccacctgtctgcaagcttctcatattttctttttaattttamatttaaatttaaaatttaaatttaaaaaaaaatttaaattttttaattttaattctttgaccaaggaaaaaagcagaggggatcacgcctgccctatctattactttgacttgtctctgtctgtcattcttcacccatattctcagactccttgctccttcttctcgagtcccagcccacaaaggaaaaatccctttttgtaaccaccacgaccaggttacagacaccctcattcacaggccatggtaccaaccctgcaaccatatgtctatgtggcaggcatcttggattatatatcccaaagactacgcataatcagaacaagggaaagacaaggattccctctcatctcgagaggaagtctttttctttaactattgaagatgtgacaacttcttataatcctggctatacatgggcaatatgatatgtccatgcacctgtcctatgattactttatcaccttaattcaggatcactaaggagtgaacatcattttcttattatttgatattataacttgtgatcttggatgatgaaaattgttacgcttgacattgctaaatggaaatgaagatcattcttatcatttttacagcagtattgctaagttatacttcattttgaaattggattgtgaattcatttttgattctttatctgatagctcactagtattcctgtttgttgattaagtttacaatttcattgtaacaggataccctcttatttaatttttgtaaaaaaaaaaaaaggggtggatatataacctaccaggcatgggggtatggttgatgtatgaaatacttgatcagatccattcatgatcgatgtatcggcagttctaagggcaagagaattcctgggcctgagccacaaaggcttagccctcaccttgtcaaacctcattcctctgaaaagctcatgtcaggagaatccccgcctcctctgatcttgtcattgtctatgcaaccaaagttaagaactaggtactatgtcacctattcattgatcacctctcaatccacaataaaggctggggtgaggccccctgctttttctcttgtttcctgcaacctaggagttctccctgctgtctctctttatctgtcctagcgccactattggccacgtccttctatctcagaattcttacctccgcttggtctcttatgtctcagattttcctttcatgrtttttctaaggaaaatagtatcaggggccatcgccgctcccatttcaattcacttctctgtgtctcttgatttatcacccattttctccgactcctttctccttctcgagcccaaacccactaaggacatacattatgtagcagccgcaggttggactcttatcccaggtttcacaaagatatatcatctcacgattcactgacctaacctcggtcaccatgaccatacgtgaaacatatgggtaccgaagactaagattgctgtgtcttccctttgggcacttgggtttcaggaccccagccccaggagtttcggttcactcccccccaccccaggaattcctttttactccctgtaccctaaaagtgtataaaacacctgcaaatcgcagcctcggggccagcactttaggtcctcggcaccaagctatattttgctcaataaagtacctcttgtgtgttgcattaccgtgtgtgtgtgtgtgtgtgtgtgtgtgtgtgtgtgtgtgtgtgtgtgtgtgtgtgtgtgtcctccatggattctgagccagaatcggacattataccttcaacccaaaaggcaggagtcctagacacggaacagaagagctgccttaacactgctgctgctgctgctgctctttgtgctacagctgaccgctctgtggcatcacattctgagggagagccaagaacacaaggtacaagtggagcccaagagtgaccaggctaccctataggttccagccatctctctatctaggcaggcactgatgccagcacacagtcagccagccagccagtcagccagccagcagcgtctagtgtattctctacctgcttcactcctttcacagacctagccaggacatggtgaggaccaaggagaatagtgaacgtgccggtaaaagggacagctgtctcatccctgcaaggacaaggtccaccctatgttgccaggaacgacacttccccccttttgaggtgaggagggatgcatggctggaggaatgggcatgcttgcaggggagggtcatgcctccagggtcacacaggacttgcctttgcctcctctatccctccagatcctcggtggacaccactccaaaggagacacttcccttacaaagaacgctcacaaggtgtgtaagccagaggacgcccagcaaaggcttttccaccaaaggcatgttggtgatctgactggcaggaagagcaggctgaacacactttaggggctctggtagttataccaggggccagccagactctcttaacagagtccaccatgcccggggtaccaaagtggccattaggatgaacagattggtaaatttggtgatggaaacttctagggagcaggggttttccttcagatgacacccacactccatgaattggttttgctttgaattttcctttccatttctccacttccttttcattataggaaagtgatccatttaagtcatcagtggttgttcatgttcaaagtagttcaggccctcctatggctgctagcttggcagcagcatctgctcagtcatgtcccctggagacagggtcagtgccacctctatgggcacagcagtgaactagagccagggcttcaggcagcgggagagcagaaagaacttccttaatcatttctgcatccgctatggaaggagaatactgagagcacagggtggaaggcaggtgtgtgactgctctaaggcaaagtgggccactcacggccaaggtccactcctatttatgcctgagacgtcaggatgtgtacgaggcttggggtccaacttgcacagagctctaaaagcttatttcaaaaccattaaaaaaaaaaaaaccctcctcggatgcaataccaatatgtggcctcaagagggagaccaagaggcgaagggggtgggggagggggagctgagcacctgaggaagttggggacctgggagtggggctactgaaggaggggactttctggtgggtgtcccccagggagaggaggggcagtgtgggaggcgggcaattgagagggaggggcagctttcaggggtaggcctgcctatggagctgaccagtacaggcagcaggcgggactactgaagaacccagaggaagaggcaggaggcgggctccgcggcggcagccacccccaaagcctcctcccctcggcagaggtgcctcatgtgaccaacttcggcccaagtgctgctcccctacctcacacagtccacacgcaacttccagtcttttgccttggcggaccttaatgctaggcacagcgacacagggaggctctgacagaaaaggcgggaactttccgctcccctccccctccgccacgtgccacctgcctgcccctactgcgcctgcgtgccacctgcctgcccctgagcgcctgcgctccaagcctcctggcctgccttttactctgggcctgcgcagctcttccacacacctccttcctccacccctcccttcagctggagcccttgcttttgccacactctgcaattggggttcgggctccaaacacacattaagggatacaccaccagcaaccaggggaaagggcacagtccccacccccacacctccgacctgggactggccttgcctcacatctatcccttacaaaaagcccgggttcggtggagggaaaacaaa

SEQ ID NO: 319 - DNA, 7062 bp, mouse
  misc_feature (102)..(102): n is a, c, g, or t
  misc_feature (2175)..(2175): n is a, c, g, or t
  misc_feature (2278)..(2278): n is a, c, g, or t
  misc_feature (5911)..(5911): n is a, c, g, or t
  misc_feature (6219)..(6219): n is a, c, g, or t
  misc_feature (6266)..(6266): n is a, c, g, or t
  misc_feature (6686)..(6686): n is a, c, g, or t
  misc_feature (6689)..(6689): n is a, c, g, or t
  misc_feature (6710)..(6710): n is a, c, g, or t
gttggcgccttcgaacagggacaactgggcagattagtcttttcttttctttccttttttctttctattctttattttctcaggcaaagataggatcccgtnggactgcgctgcaggcaggcggaccggcgtgtccgttataaagacgggtaagtatttatcatggggcaatcagaatcaaaagggaaaaaattgttcctgtcagtgtttaaacacatgctgtctggaagaggcctaaaaatctcggataaatctttacaagaattttatgatttcgtgcaaaaaatcagtccctggtttccagaggagggaagcttgacactagaagattggaagcgagtaggaaaggatatgaggaagtttcacgaggaaaatttatccaggaacgtccccgacagtgcttttatattgtggcaacagatgagggatttattgactgagaaaacagacctagaattccttgcagaggaagctccttcagagctctctgatgatcagaaagtgaaacccgatactggtaaaaagaaatcgtattgttcaagaaaaaaagggataaagctagaaaaaagtgaatcagagatcactgacagcgaaaatgatgacgaatgggaaaggactaagggaatggcaaagcgcgtaattaagggaagaaaggatcgttttagtaagcacacagatagcagtgaggaggagtctttaattataacaccagccgcccgcagaccagtgccaaagccacgtagacttttgccgccggtaggctttgatgctgctgtggcagaggcaaaaaggcaaggagactttacactcacttgcccggtaatctgtgaagaagggagtgagccgcgatgggaacctttgtcgttaaaaactcttaaggaattacagtcagcagtaaaaacgctgggccctactgcaccatatactttacaggtcctggatgcagtagctagtcagtggctgaccccttatgattggtaccaaaccgcgaaagctactcttgctcccggagatttcattctctggagaacagaatatgaagaaagggccagaaagttagctcaggaaagatcttcatcgagaaatggagctagacccacagtgcctatgcttcttgggcagaaagactatgctagaccagcagcgcgactgaatattcctaaggcagtgttggagagaattaatcagatagctatatctagctggcggagtttacctgtacctggggctaaatccacagtcctttcaggaattagacaaaagcatgatgaatcttatgaaagttttgtagctagattggaagaggcagtttccaggatgcttcctccctcggaaggtactgatatactaatgaaacaattggcttgggaaaacgctagcaccttgtgtcgagacctgatcagaccaatccgtaagacaggctccctacaagattatataaaagcgtgtatagatgcctcaccggccgtaattcaggggattgcttacgccgcagcgatgaaaggacagaaatttggcgcctatattaaaaacacttacggagtttcatgcttccggtgtggaaagccggggcacctgaggaaagattgtaaaaatccctcaggaagtaagaaaaacgttccttcgggtccctgcccacgatgtggcaaaggaaaacattggaaaaatgagtgtagatcaaagttccacaaggatggaactccgctcaccagagaagcgggacagccaaaaaactagatgaggggctgcctctcagccccgaaaaaagagaggcacagagtcaagaggagggtagagaacccgctcctctgaacccggaagccccggagtttactattcatcatttacctagagccaccccagggagcgcaggactagatcttgcaactttaactgacgttataatttctagttgggatggcgtgcacctcatttccacttcagtgtctggtactctgcctccagggactgttggtctcatcataggacgtagctcgaattttaagaaaagcttcgaggtggtccctggagtggtagattctgacactctaggtgaaattaaagttatggttaaagcgttgaaggaaacagttcagcttcataaaggtcaaaggatagctcagctcctgttattaccttatctacagctcccaaatcctacgttaaaaggagagngaggcaggggacaatttggatctacggacgctgtagcttgggtacaggaaattaatgatcagaggccttttaagaatatcattgttaatggaaagtcgtttangggccttctagatactggcgctgacagatcctgtattgctggtaaagattggccttcatcctggccagttcaccggacttcctctaccctgcaagggttgggaatggctgctaatgtggctcaaagctcacaaatattaagatggaagtgtgagggaaaaacagggcatatacagccttacgttatagcttccctacctttctcactttggggaagagatattatggaagaaatgaatgttaaattggttacttctgataattcaaactggcagaatttttcataggggtcactgatgaacaattatatgctgacaaaatagaatggaaaaactcagagcctgtgtggattaatcagtggcccctgactagagaaaaaatacaggctattgaagaattagtaaagcaacagttggagaaagggcatatagaggagtccaacagtccgtggaattctccagttttcgtcgtaaagaaaaaatcagggaaatggagacttctacaagatcttagagcagtaaactctactatgcatgatatgggagctttacaaccagggctaccttcgccagttgctattccaaaacgatattatattatagttatagatttacaggattgcttctttactataaaattgcatccagaagattccaaaagatttgcttttagtattccttcagtaaatttgcaaaggccttataggcgatttcagtggaaggttttacctcaaggaatgaaaaacagtcctacactgtgtcaaaaatttgtagataaagccttattggaagttagagaattatttccacaggcatatatactgcactttatggatgacattttgatagctatggagagtaaagagcaaacagaacagattttgaaaataactataaaatgtttaacaagatatgggttaattgtagctccagagaaaattcaacataatagacctttgagctacctggggcacttaatatataaagattgtatttcttctcaaaaggtcacccttagattggataaattaaaaactttaaatgattaccagaaattgttaggggatattaattgggttagaccatacttgaaacttaccacaggagatttaagccccctgtttaacatcctaaagggagacactcgtcctaattcgcctcgagttttaactcctgaagccttacaagctattgctttggtagaggagagacttacagaggccaaagtacagcagttggactatactaaagaatgggagtttttaatccttaagactgcttatacacctactgggtgcctctggcaggagggagtactggaatggatttatctacctcatacgcaaaccagaatggtgtcctcttatttgtttatgtgttcaatgttgattattaaggctcgaactcgttccaaagaattatttggtaaagaaatgcaaaatataattgtcccgtttaatagacagcaatttgaacagttattacaaaatgatgaagattggggaatagcgttacaaggatatactggacagattaagtatcatttacctagacatcctttgattgaatttgctaaaaatgctgaatttgtttttcctagtaaagtttctaaagagcctctgcaggaagcactcctgctttttacagatggttcctctaacggcagggcagtagtgtatagagaaaatcatcctcctataataaaaagggtaatagagttttctgctcaacaagcagaaattactgctgtaatcctagccttagaaaattttcctcaggcttttaatctttatacggattctaaatatgtcacaggcctgttcccggctatagagacagccttgctttctggcgattctaaaatcctaaagcaattacaacaactacagtctctaattcagaagagaaaagagaaattctttataggacatatccgtggacatacgggacttccaggtccactgtccttaggaaactcattagcagacaaatatacgaaagaaataatcatgagtgccatagaaagagctcagcatagtcatcagctacatcatcaaaatgctctggcattaaaaagaatgttccaaattactagggaacaggccagacaaatcgtgaagcaatgtcagcattgtcctgaggtacaccaccccccaaaaatgggtgttaacccacgaggtttaaaggcacagatcctatggcagatggatgtcacccatataccggagtttggaaagctgtgctttgtgcatgttacggtggataccttctcgcatgctgtcatggccactgccagaacaggagaagcagtaaaagacgttatacaacacttgctggcttgtttttcatacctaggtgtcccgaggaaaataaaaacggataatgggccagcttatatttctaaagcatttgcaaagtttttgaatcagtggaatgttgagcatgtcactgggattccttataacccacaaggacaggcaataatagaaagaactcatcaagtattaaagaatcagcttgatagggtaagagctgcgaatcagttttactcaccccatcatgctttaaatcatgctttatttgtaattaatcatcttaacaccaatgaacagggagaaactcctatgatgagacattggggaccggttgccttaaaggcacaaccattagtaatgtggaaagatcttttaaatggagtctggagaggtccagacactttaatcacttcggggagaggatatgcatgtgtctttccacaggatgccgaatcccccatctggatcccggaccgactcatccggccggccccgcccctcccgcgcacaaagactcgcgaagaagagaaaaaggaagcagaaggagcgagcacttgcagctaaaatgaagaagctctccctatccccaccgcagactgcagcaaccggagccgcgctggtaccgagttgggagcaactaaggaagctgactcgtgaggcggaaggaatggtgcagaggaccggcaagacactctcctctgaaacaatgtttttggccatgcttgctttagtagctacgcaggtgactgctgtagcgggggatagtttttgggcgtacatacctaagccaccccttcttcatccagtcgggtgggatgagcagaatcatattaaggtcatgactaataattctgagctgatgggtggtttcctggattttggtagggaccatcgcacttccaagcgtttttattatgaaggaaggtctgatgtggcccctatttgtctagcacttaaagggccggtaccgataggatgtttgccagtcaattatagatcttttgtgactgatgctcctgattacgagaataaatttcagcgctgggtatggaaactacgaatccagacgcttggatatgataattatagcgaaacttctgaaaccgtatctaatttgccaatccccgattgtatagaacttaccaaagataatgataaagactatacttggaatagtatggttactaaataccctttatggctagattgtggatttaaatattcggctactgtttttcaccctaggggaactcaagactcagtaacagacttttcagtcccgaatccccatgctaaccttactcgctattttaaacaacnctcagatattcgatttcatggatttgaccctgatatggggaacgagcccttgaaacgttattctactctgggctttatagccccaatttgggttggtcgttctattgctcacgatactattgctattcaaccggaattgtttagacttgttgctgccaccaacacgatttttttaaaggaacccaaagctctagtcgactcccctatatatgtgaaagcttgcgtaccttacccatatgctattttattgggaagtcctgacagagttaagatcaccaatcttggcaagtccttttatatccagtgtnattcttgtcaattaactaattgtgtagaacctaatttagacaaggantctgctattatgattttacttaaaagacctggatatgttttactgcctgtagagttaggaaacgatccttggtttgagaattcgggattgcaagctttaaaaagactaaacgaacttattagacctaagagatttgtagcagctttgatcctgggaattactgctttaattgctattttaacttcctttacgttatccaccacagccttagtacagcaacaacatactgctcactttgttaatgacatgcataagaatatctctgtagctttgtcagagctgtattttatagataaaaaattagaagcaaaggttaacgccctagaagaagtcgtgctggcaatagggcaagatattgctaatatcaagaccaggttagctactaaatgtcatgcttctttccaatacatttgtgttacnccnttaccttacaacgcgacgacngactgggaaaagacaaaaactcatttacagggtatatggaaagatactgatatttctcatgacttagaacagttaaaggtaaaaatttcagatattagtaaaagccatctggacacttggaacattgatgaattggctagagatttaaagaacaacttaagtgcattgaaccccctggattgggttcaatatattatcctacttgttattatttttggcattactttattagtaatcattgtgtttccactcatctttagagtgctcctgaaatctgtagctacgacgaagcgggacatcctggaacttcggctgagaaataaagataaattaaaaaaaaataagggtgaga

SEQ ID NO: 320 - DNA, 358 bp, mouse
tgtaacctcccctccccagcctgaaacctgtttgctcaggtttcagtgttagagagcatcggggcagagcttgccgccctatcgtcctgccactcccactgccgctgcctgcctcctagctgttccggagccatcacgtgttcacctgcaaccttactccaagatgatttggcgggaatcgggccccttcccctccttcataactgagtgtccgaattagtaaaattgagctttgatcagaatttttgtcttagcttcatctttctctcgtccgcctagctccctcttctcttccaggtttccaagatgcctttccagaacagaacccagacatgtgagccgctggccggacacaaca

SEQ ID NO: 321 - DNA, 5551 bp, Eutheria
atttggtaccgggagtggttctagggaaacaaaattgtaaaaatgaatcctttcaagtggttcttgagtctggctagtagtaacactgttgctaactctgctcctatcggtaaaaagtgccctgctagtccgtgggctgaggtggcggtacacatccgcaaaatagccccaccgatagatcagatattggtgaaaggtgaccctcagggtgaaaacatgtgtgatgacttttcgaaattatgtgtggatgagcagtacaaggaagttgggtggctggtcctacttgcattagataagctggtgaaggaaaaagatgagctcagggccttggaatcaaagctctcgtgtcgtgtaagagacctcaaagctgctgcttgtgctttaaaagaaaacctcattacctgtaatagcagagccgaaactgctgaaagccaaacccagatgcttatcgttagagtggcggaattgcaacgccagctcaattgccaatctcgagaagtatctgaaattaaagtgagggcattgattgggcagaaatgggaccctgcaacttggaatggagacatatgggaggatgatatggaagctggggacgctgagcccctcacttccagtaaagctctcctgtcagctgaaccacacccatgtgaagggattacttcgcctttgtctgcgaaaccgccccgcccagtaaagccattatcccctccgctccaacctaatgagattagctgtagcccccctgccgctgaagagcgcctgccagagccattgcctggggcacggcctaaggcagaggctttacgagagcctgctgaagattctaagaacacttcggcactgccgattttggcttctaggcctgtaactagacttaaatccaagcaagctccaaaaggtgaagtacaaagtgtgatccaggaggagatacgctatactccaaaggaactacttgacttttctaacacatacaaacagaaacctggggaatatgcttgggaatggctgttaagggtgtgggataatggtgcaaggaacataaagctggatcagtctgaatttcttgacctgggtccactgagcacagacccttcattcaatgtttcagctcgagaagttaggagaggacctaatagtttgtttgactggattgctgaagcatggctgatgcggtggcctacattaaatcaagttgaattgccagacttgtcttggggtactgtagaagagggtatccaaaggcttagggaaattggcatgctagagtggatttattcagttaggccttcaaatccacacatagcatgtccagaggacacaactttcaccacaaccgtgagaaacaaatttgtgaagggagctccgggatccttgaagactgctgtgattgccattttatgtaaatcagacatgacagtgggagctgccctagctgaattaagacacctaactacaatggggctgactggatcccgtggtggtaagagtcaagtggctgcactcagtcgacaaagacgaggtgggcgtgtttacagtaatggacagcagaggcaaaatagtaatcgtgataatctgactcgtgcggacatgtggaactggctccttagtcatggtgtccctagcagtgcaatagatgatcagcctactaagtatttacgtgatatgtatgaaaggatgaactctaggtcaggtgaacagcagtctaactcaaatcgccagaagagagagtcgcggtccctcaatcaattcccagacttgagcgagtttaaggacccacagccccttgaatgaaggggaggccaggtccctttgaggaagaattctgataccctgccaaaactttacactgttaatctttctcctgcccttccccaaagggatctacggccttttacgagagtgactgttcactggggaaaaggaaataatcagacttttcggggactactggatactggctctgaactgacactaattccaggagacccaaaacgtcactgtggcccaccagtaagagtgggggcatatggaggtcaggttattgatggagtcttggctcatgttcgtctcacagtgggtccagtgggtccccgaacccatcctgtagtaatttccccagttccagaatgcataattggaatagatatactcagcaattggcagaactctcacgttggatccctgacaagtggagtgagagctattatggtgggaagagccaaatggaagccactagaactgccactgcctaggaaaatagtgaaccaaaagcaatatcgtattcctggaggaattgctgaaattactgccaccattaaggacttgaaggacgcaggggtggtgattcccaccacatccccattcaattcgcctatttggcctgtgcgaaaaacagatggatcttggagaatgacagtagattatcgcaaacttaacgaggtggtaacccccattgcagctgctgttccagatgtagtttcactgcttgagcaaattaatacatctcctggtacttggtatgcagctattgatctggctaatgctttcttctccatacctgtttccaaggaccaccagaagcagtttgcattcacctggcaaggccaacaatacactttcacttgcctgcctcaaggctacattaactctccagccctatgtcataatctagtccgcagggaccttgattgcttccctcttccacaagatgtgacactggtccattatatagatgacattatgctgattggacctagtaaggaagaaatatcagtgactctggacttactagttcaacatttgcgtgctagagggtgggaaattaatcccacaaaaattcaggcaccttccaactcagtgaaattcctaggggtccagtggtgtggggcatgtcgcgatatcccttctaaagtgaaggataagttattgcacctggctgctccgacaactaaaaaagaggcacagcgcctagtgggtctctttggattttggaggcaacatattcctcatttgggtgtgctacttcggcctatttatcaagtgactagaaaggctgctacttttgagtggggcccagaacaggagaaggctctgcaacaggttcaggctgctgtgcaggctgccctgccacttgggccatacgatccagctgatccaatggtgctcgaggtgtcagtggcagatagagatgctgtttggagtctttggcaggcccctattggcgaatcacagcgcagacctttaggattttggagcaaagctctgccatcctctgcagataactactctccttttgaaaaacaacttttggcttgttactgggccttagtagagactgagcgcttaaccatgggacaccaggtcaccatgcgtcctgagctgcctatcatgaactgggtattgtctgacccacagagtcataaagttggacgagcacagcagcactccatcattaaatggaagtggtatatacgagatcgggcccgtgcaggacctgaaggcacaagtaaattgcatgaggaagtggcccaaatgcccatggtctccactcctgtaacattacctcctgtctcccagtttgcacctatggcctcatgggggattccttatgaccagctgaccgaggcagagaaaactcgtgcttggtttacagatggttctgcgcggtatgccggcaccactcgaaagtggacagcagcagcactacagcccctttctgggacctccctcaaggacagtggtgaaagcaaatcctcccagtgggcagaacttcgagcagtgcatatggttgttcactttgcttggaaggagaggtggccagatgtgcggctgtataccgattcatgggctgtggccaatggcttggccagttggtcagggacttggaaggaacatgactggaagattggagacaaggatttatgggggagaggtatgtggatagacctctctgaatgggccaaagaagtgaagatatttgtgtctcatgtgaatgctcatcaaagagtaacctcagcagaggatgagtttaacaatcaagtggataggatgacccgctctgtgggaaccaatcatcctctttctccggctacctctgtcattgctcagtgggcccatgaacaaagtggtcatggtggcagggacagtggttatgcatgggcccagcaacatgggctcccgctcaccaaggctgacttggctacagccactgctgagtgcccaatctgccagcagcagagaccaacactgagtcctcgatatggcactgttcctcgaggtgatcagccggcaacctggtggcaagttgattacattggaccgcttccatcatggaaaggaaagcgttttgtccttactgggatagatacttactctggatatggatttgcctacccggcacgacatgcttctgccaaaactaccatccgtggacttacagaatgcctcatccaccgtcatggaatcccacacagcattgcctctgatcaagggactcacttcacagcaaatgaagtgcggcagtgggcccatgctcacggaattcactggtcttaccatgttccccatcatcctgaagcagctggcttgatagaacgatggaatggtctcctgaagacacaattacgctgccagctaggtggcagtaccttgcagggttggggaaatgttctccaggaggctgtgtatgctctaaaccagcgtccaatatacggtgctgtttctcctattgccaggattcatgggtccaggaatcaaggggtggaaacgggagtggcaccactcactgttacccctagtgacccacttgcaagatttttgcttcctgtccccatgactttatgttccgcaggactaaatgtcttagttccgaagggaggaatgctgccgcctggagacacatcaacgattccactgaactggaagctaaaattgccaccaggccattttgggctccttgtacctctggatcaacagacaaagaagggagttacaatactggccggtgtgattgatcctgactatgaagatgaaattggattgacattacataacggaagtaaagaagagtatgtttggaatgcaggagatcccttaggacgcctcctagtactaccatgtcctgtgattaaggtcaatggaaaactacagcaacccaactccaaaatgagtgataatagcccagacccttcaggaatgaaggtttgggtcacctcaccaggcaaggaaccacaaccagctgaggtacttgctgagggcaaagggaatacagaatgggttgtagaagaaggtagttctaaatatcagttacggccacgcgaccagttgcagaaacgaggactgtaattgctatgagtattcctgctttgtatgtgtgtattggatattttgtttacttatgaaacgtaagatgtaaatgggttaatgcattttcagttgtacatgtgttagttatatcatgttgacataagtatgcctttgtaactgtaccccttcagagactgtgcatggtaaggtgagatgtgtgcagatgccaagttgacaaggggtggat

SEQ ID NO: 322 - DNA, 471 bp, mouse
gacctgtaatatggcgagaaaacagaaaatcacggaaaatgagaaatacacactttaggacgtgaaatatggcgaggaaaactgaaaaaggtggaaaatttagaaatgtccactgtaggacgtggaatatggcaagaaaactgaaaatcatggaaaatgataaacatccacttgacgacttgaaaaatgacgaaatcactaaaagacgtcaaaaatgagaaatgcacactgaaagacctggaatatggcgagaaaacttaaaatcacggaacatgagaaatacacactttaggacgtgaaatatggcaaggaaaactgaaaaaggtggaaaatttagaaatgtccactgtaggacgtggaatatggcaagaaaactgaaaatcatggaaaatgagaaaaatccacttgacgacttgaaaaatgacgaaatcactaaaagacgtgaaaaatgtgaaatgcacactgaaggac

SEQ ID NO: 323 - DNA, 2530 bp, Tupaia belangeri
ctgagatggatactgaacttcagctgtgaaatattgctttcattgactaaaaatgaagattttctgctgagacttctccctccagattcatttctagtgggtagtgctacctctgtctccttctctccatttctctctgtctctctgtgtctccctgtgtcttttaattttttttaaaaatttttaaggtaaagtattctctgggctctcaagcccctcctttattgtgctaattggtgcctttccccattcyatttaggaaaggcacaaacccaggcccatcctgagatggatactgaacttcagctgtgaaatattgcttttgtgtggcatgcatggttttcaatttttgctttttaaaattaaaatctaaagttttttattatcttttttctttcttcttttttattttattttttcttcttctttcctcttctctaattcttttccttttttctttatctttattcattggctgctcagcctctacgcactaagtgtctagacaggtccaagtgaacaggatccaaacatctgaatacgattagggtcagaatattcctctattcccactgaatctgatgcacaaagagtgaaaacggaacagaagagagattgcagatcacctcctcctgcatgcctctgaacactcagattgaacttcaagaattaggaagaaatgcaccatccatcagatgactagaaatcaccacagggtcacaagaaatatgggaaagcaagaaaatacctctcctccaagggaaaagaataactcctcttcatcctcagacagtacaatgaaactcatggaaatgtctgataaagaatttagaatattcatagtgacaaagctaacagagatggaagagaagagagacaatgaactgcagaagaggcaggagaaaggagctgatgagttccaggaggtgaggaaattcttgcaagatctaaaagaggaaatacacactataaaaaagaatcaaatggacctgttagagatgaaggctataatacaggaagtcaaaacctcccttgaaagtattaaaagcagactagatcatacagaaaatcgaatctcagatgtagaagatagaatcactggcctagaaaaatccaccatgaagactgagaaaattgccccccaaaaaaatgagaataatatacgagaaatactagataccatcaaacgtccaaacatccagataattggtatcccagaaggkgaagagactcataagggcattgataatctattccatgaaatcctggaagaaaactttccaaacctagagaggcattcaaagatccagtcccaagaaatacaaaggaccccaaatagaatcaacccaagaagatcttctccaagacacattatagccagattgaccaaaaccacagacaaagacaagatactaagattggcaagagagaaacgtcaagttacctacaaaggatatcccatcaggctaacagcagacctctcatcagaaacaatgcaagcgaggaaagaatgggaaaatatattcaaagtgttaagggaaaagcaatttcaaccaagaatactgtacccggcaagattatccttcatatgggaagaaaagacaagaacattctcagataaacaaaacctgaaagaatttaccaacaccagaccagatctccaagaagttctgaagggagtgctataccaggaaaattaaatacagacacacagaaataagagttcaaaaactaagaaaatggccaacttaatcatagggacaagtctggagttgaatattatatcccagaatttaattgggaagattgaaccacaacagaagatagattaagtacatgagactgaactggtgaaatagaattttatgacttttgactaaaacattgctgatttttcttctaggctttgttttccggttttaaggatttttgtcctgtcttgagctgctgataggttcatgtacctactatttgaacagaatcctaacctgtttcctggctttaagttttaagcaaagttccttagcatttctttgatttattaaagctaaaactgcttttcttgaaattaaaaaatatagtaaaaaatacatatttaatgaccatagtaagctatatagcatcagctaggtgctaccttatagtatattcattctactcagagtttcatgcctaaagtcagacatgtattcacagatatgtatatatcagctgaacttgctattgaaagtagttagattatttaagaaattttgtgaatcaataaaatgtgggggaaaaaaggaatggaaaacaactgtagacacctgagatagtgtgggaggagggtagggaaatggcagagggtgagaaataggggtaaaatatatacatatatatatatatatatatatatatatgaaactagaaatggaaaattattgatgataacatgtatgattaagccactatgcagtatattctggatgggaaatcacattttgtatgctgtgacaatgctcagtgaatgaatgtaaattaattaattaaa

SEQ ID NO: 324 - DNA, 3154 bp, Cavia porcellus
gggagaccagagaacatggcggacagacaacagcaactaccagaggctctctgaaaggttcggctcagaggccagaaataatgcggactagggagacacgaatcagtagagatatgctctgctgactcaggaacgaactgggctgagagaatccaacttggaatacagtcctggcgctaaaataggaacagaaaaatctcggtgtggaggctcgactccgcgccatcggaaaccggtttggatttcccgccgtgcggcggccggctatctccacagcggctcagcaaggagagacgcgccgagctctgggagcgccgagctctgggaacgggagaacggagtcgaaaaaaaaaaaaggacggacagaggtgtacacgaaaactgactggtggcgaggtgagtgagaatctgaccccccaccacagtttgactctagcggagatctctctgggcgccattcccctctcggacgggattggagaaaagtgcctggcctgagtgacgctgctggcggactctctaggctagactagcctaacccagatcccagagccggacgatggcccggaggagcgactgacttccgcgtaggctgcctcctccgactccctggtgcgcagcggtgggcgggaacaactagccagcgcaatttgatcaggctgtggctgacaggcagggaagccgggcctcctttgtaagattgcattttataaggaacaaaaaatatggggaagggaagcaacaaaaaaagctcctcggcccccaatcctgagaaacaggcaataatggacgccgcaccagtatacattaagcaccatattgagagcctcatagaccaattcaggaatgaagttatcaatgatctgaagctagaagtatgcagaatagttagagaaatgctaaacaccacccaggaaaaaacagatggtggaatggaagaacagaaaaagaggggagaattgcttgatggagaaaacagagaaagcattgagtatgtgaagcaggttcaaagggactatcaagaaattaataagtctatacaagactggcataacagcttgaaagaaactaaggacagactatctgaactggagggcagacttgaaatatgggagaatgaaatgaaaaacttcttaaaaataacaaagaaacaaacagcaataatacaaagacaagaagatgataagaggagccaccacttaaggattaagaacatagaagaagaagtagggacacaaacaaatgaattacaaaagctactcacagaaataatccaggagaattttcctaatttagcaaaaggtaaagatactcagctgtatgaggcatacaggaccccagctacctacaaccctaacagagaaacacccaggcatataataataaaaatcccagaaattcaatacaagaacagaatattaaaagctgtaagagacaagaaacagatcacttacaaaggaacacccatcagaattacagcagatttctcttcacaaaccatcaaatcacgaagagcatggggggaaataattcaagctttgaaagataataatctccagccaagattgagatatcctgcacaactgtccctggaaattgatggaaaaacgaggtgcttccaggataaagaggaactgggggaatttgcaaccaccaattcaactctacagaaagtattgcaggatattctaaaaaaagaaaaatacaaagaacccagaaatagtggcagggaggccacaacgaatggagcagagaacaaaatgaagaagacaaactgacagctactgacagaaaaagagctcaacagaaatgagacagagaagattggatgataggaacagctatttttgagaaaatgacatcttaataggtaatgctgattcagtaccatcttgttttgaagtctcatctagcttttgttcttctgtctccaatggtctaaccaggttgtatcttattggattttgttatgtacgttagtataagcaaaaaccttttaaagacaaggagattatacagagaccattgttcattttctgttagtcaattccaaatactctataatgctgtcattctcttaaatggttttacattgttttgatatacttaatgctacagtatatgaagttgtactcaaggacttcagggagggagtcaatatggtaactatttttaagtcggaaatatctggtggtgaaacactattctgcttaaaaggttatgttttgatctgccctgtttcgctgttatgccctctttttctttttctcaatctccactccattatatacttttttattgttatccatttaattaaagggaaaaatatagcaggatataatatagtaacccactttgactttctattttctcgatttgaagccctgtattactctcaccatcttgtttttgactgaggttcctctattctgttttgctgaatagtatcaggttcgaaagtttaggcatcagctgagaagataatgagattcattataacgcccattctcgttgacttctatctacttttgaagacctacaatatctccaatgttttggttttgtcggttttatcctttacggttttgttcaatagtattacaactaacgatataggcaattctattagaaatagcgggaggcattagggtaaccattgttgatcaccttgtattatgtttttatattatctattatatccacccttttgacttgaccgattctgttctgtcatgtcacatttggttttactctcttccaaaaaagcaataagaacagtgggagcaatgaaacccaaaatgtgtaatagtcactgtacaaaagagaggaaaagaaaatgctctaaactatataactgcatgtatatttaaatgtataagacagaaaatgatatcacagagttctaatggatcattgaacagaactgtttgcagtatcattgctggaatgtccactctacaaactttaattctgtgacttgaacaattatttctaagatggcaatatgtaatctattaactagtgatttcctactgcgcattttttttcttctgtaaatctgtataacttgtacccttcactgtttttttttcttttcttttctccttaaataaaaattaaaaaaaaaaaaaaaaaaaaaaaaaaaaaaaaaaaa

SEQ ID NO: 325 - DNA, 7713 bp, Endogenous Retrovirus Eutheria
tttggtgccttgactcggattgggggacctcccttgggagatcaatcccctgtcctcctgctctttgctccgtgaaaaggatccacctatgacctctagtcctcagacccaccagcccaaggaacatctcaccaatttcaaatctggtaagcggcctctttttactctcttctccaacctccctcactatcctttaacctctttctcctttcaatcttggcgccacacttcaatctctcccttctcttaatttcaattcctttcattttctggtagagacaaaggagacacatcttatccatggaccccaaactccggcgccagtcactgattagggaagcagcctttccttggtgtttaatcattgcagggatgcctctctgattattcacccaggtttcagaggtgtcagaccacgcagggacatctgccttggtccttcacccttagcggcaagtcccgcttttctgggagaggggcaagtaccccaaccccttctctccatgtctctaccccttctctgcttttctggggcaggggcaagaacccttcaaccccttctccttcacccttagcatcaagtcccgcttttctaggggggcaagaacctccaatcccttatttgcatgccctgacctcttatctctgcaccctaatcccttatttccgtgccccaacctcttatctctgcaccccaatcccttatttctgtgccccaacctcttatctctgcaccccaaccccttatttctgtgccccgacctctttcccgcttttctggagggtaagaacccccaaaacccctccctctgtgtctctactctctcttttctctgggcttgcttccttcactatggacaactttccaccctccattcctccttctcccttagcctgtgttctcaaaaacttaaaacctcttcaactcacacctgacctaaaacctaaatgccttattttcttctgcaatgctgcttaaccccaatacaaactcgacagtagttccaaagagccagaaaatgggactttcaatttttccatcctgcaagatctaaataattcttgtcgtaaaataggcaaatggtctgaggtgtctgacatccaggcattcgtttacatatcactcccttcctagtctctgtgcccaatgcaactcatcccaaatcttccttctttccctcccacctgccctctgagtcccaaccccaagcattgctgagtctttctaatcttccttttctacagacccatctgacctctcccctcctcaccaggctgagctaggtcccaattcttcctcagcctccactcctccaccctataatccttttatcacctcccctcctcacactcagtctggcttacagtttcattccgtgactagccctcccccacctgcccagcaatttcctcttaaaaagttggctggagctaaagacatagtcaaggttaatgctcctttttctttatctgacctctcccaaatcagttagcatttagactctttttcatcaaatacaaaaaacccagcccagttcatggctcattcggcagcaaccctgagacgctttacagccttagaccctaaaaggtcaaaaggccgtcttatcctcaatatacattttattacccaatctgctccaaacattaaataaaactccaaaaattaaattctggccctcaaaccccacaacaggatttaattaacctcaccttcaaggtgtacaataatagaaaaaagttgcaattccttgcctccactgtgagacaaaccccagacacatctccagcacacaagaacttcgaaatgcctcaacctcaggtgccaggggttcctccagaaccttctcccccaggagcttgctacaagtgccagaaatctggccactgggccaaggaatgcccacagaccaggattcctcctaagctgtatcccatctctgtgggaccccactaaaaatcagactgttcaactcacctggcagccacttccagagcccctggaactctagcccaaggctctctgactgaccccttctgagatcttcttggcttagcagctgaagactgacactgccagatcgcctcggaagcctacaggaccatcacagatgctccaggtaactctcacagtagagggtaagtctgtccccttcttaatcaatatggaggctacccactgcacattaccttcttttcaagggcctgtttcctttgcctccataactgttgtgggtattgacggccaggcttctaaacctcttaaaactccccaactctagtaccaacttagacaatactcttttaagcactcctttttagttatccccacttgcccagttcccttatgaggccgagacacttcaactaaattatctgcttccctgactattcctggactacagctacatctcattgctgcccttcttcccaatccaaagcctcctttgcatcttcttgtatcccccaaccttaacccacaagtataagatacctctattccctccttggtgaccaatcatgcaccccttaccatctcattaaaacctaatcactcttacccggctcaatgccaagatcccatcccacagcatgctttaaaaggattaaaacctgttatcactcgcctgctagagcatggccttttaaagcctataaactctccttacaattcccccattttacctgtcctagaaccagacaagccttacaggttcaggatctgtgtcttatcaatgaaattgttttccctatccaccctgtggtgctgaacccatatactctcctatcctcaatacctccctctacaacccattattctgttctagatctcaaacatgctttctttactatccctttacacccttcaacccagcctctcttcgttttcacctggactgaccctgacacccatcagtcccagcagcttacctgggctgtaatgctgcaaggtttcaggggcagcccttattatttcagccaagctctttctcatgatttactttctttccacccctccacttctcaccttattcaatatattggtgatgttcttctttgtagcccctcctttgaatcttctcaacaagacacacttctgctccttcagcatttattctccaaaggatatccccctccaaagctcaaatgtcttctccatccgttacctaccttggcataattcttcataaaaacacacgtgccctccctgctgatagtgtctgactgatctctcaaaccccaaccccttctacaaaacaacaactcttttccatcctaggcatggttggatactttcgtgttaggatacctggttttgccatcctaacaaaaccattatataaactcacaaaaggaaacctagttgaccccatagatcctaaatcgtttccccactcctctttccattccttgaagacagctttagagactgtctccactctagctctccctgactcatcccaacacttttcattacacacagctgaagtgcagggctgtgcagtcagaattcttacacaaggaccgggatcgcatcctgtagcctttttgtccaaacaacttgaccttactgttttaggctggccatcatgtctccatgcagcgtctgctgccaccctaatacttttagaggccctcaaaatcacaaactatgctcaactcattctctacagctctcataatttccaaaatctattttcttcctcacacctgacacatatactttctgctccccggctccttcagatatactcactccatttattctcccacaattaccattattcctggcctggacttcaatccggcctcccacattattctggataccatacctgaccctcatgactgcatctctctgatccacctgacgttcaccccatttccccacatttccttctgccctgtttctcaccctgatcacacttggtttattgatggcagttccaccaggcctaatcgccactcaccagcaaaggcaggatatgctatgaactagttgccttaattcaagccctcactcttgcaaaaggactacgtgtcaatatctatactgattctaaatatgcctttcatattctgcaccaccatgcggtcatatgggctgaaagaggtttcctcactacacaagtgtcctccatcattaatgcctctttaagaaaactctgctcaaggctgctttacttccaaaggaagctggggtcattcactgcaaggggcatcaaaagacttcagatcccattgctctaggcaatgcttatgctgataaggtggctagacaagcagctagctctccaacttttgtccctcatggccagtttttctccttcacatccgtcactcccacctactccacagctgaaacttccacctatcaagctcttcccccgcaaggtaaatggttcttagaccaaggaaaatatctccttccagcctcacaggcccattctattctgtcgtcatttcataaccttttccatgtaggttacaagccactagcctgtctcttaggacctctcatttcctttccatcatggaaatctatcctcaaggagatcacttctcagtgttccatctgctattctgctacccctcagggattgttcaggcctcctccctttcctacacataaagctcggggatttgcccctgcccaggactggcaaattgactttactcacatgcctcgggtcagaaaactaaaatatctcttagtctgggtagacactttcactgggtgggtagaggcctttcccatagagtctgagaaggccaccgcggtcatttcttcccttctgtcagacataattccttggtttggccttcccttctctatacagtctgataacggaccagcctttactagttaaatcacccaagcagtttctcaggctcttggtattcagtggaaccttcatatcccttaacatcctcaatcttcaggaaaggtaaaaccgactaatggtcttttaaagacacacctcaccaagctcagcctccaacttaaaaaggattggacagtacttttacctctcgcccttctcagaattagaacctgtcctcgagatgctacagggtacagtccatttgaacttttatatggacgcactttcttgcttggtcccaacctcatcccagacaccagccctctaggcgactatcttccagtcctccaacaggctaggcaggaaagtcaccaggctgctaatcttctcttgcctactccagatccccagccatatgaagacactctagctggacgatcagttcttgttaagaatctgacccctcaaactctacaacctcgatggactggaccctacttagtcatctatagtaccctgactgccgtccgcctgcaggatcctccccactgggttcaccattccagaataaagctgtgtccattggacagccagcctaatccctcctcttcctcctggaagtcgcaattactctcccctacttcccttaaactcactcgtatttctgaagaacagtaataacccttatgagcctaatacatcccttcattctattaggtctgtttgtccttaccctactttttgcaacagggctttatgaactcacccccaccacttaggctgagcccaaaaaatcttgtcatccctactattttctgtccagtcatactcctattctctgctctcaactacttataaatgccgtactcttgtttacactgctggtttacactgtttcttcaagccatcacagctgatatctcttggtgctatccccaaaccgccactcttaattccctcttagagtgggtagatgatctttgctggcagggcaccctccaatacttccaccctgatgaagttctattctttacttttatactctctcttattctcattcccattcttatgccaccttttgcctctccccagctatctccaccacactatcaaccttacccattctctcctagctgcttctaatccctccttagtgaacaactgctggctttgcatttccctttcttccagtgcctacatagctgtccctgccttacagacagactgggctacatctcctgtctccttacacctctgaacttcctttaacagccctcacctttaccctcctaaggaactcatttactttctagacaggtccagcaagactttcccagacatttcacatcagcaagctgccgccctcctccgcacttatttaaaaaacctttctccttatattaactctactccccccatatttggacctctcacaacacaaactattattcctgttgctgctcctttatgtatctcttggcaaagacccactggaattcccctaggtaatatttcaccttcttgatgttcctttactctttatctccaaagcccaactacacacatcactgaaacaattggagccttccagctccatattacagacaagccctctgtcaatactgacaaactcaaaaacattagcagtaattgttgcttaggaagacacttaccctgtatttcactccatccttggctaccttccccttgctcatcagactctcctcccaggccctcttcttgtttacttatacccagcccccaaaataacagtgaaaggttgctcatagataatcaacgttttctcgtacatcatgaaaattgaacatcctcctctatgcagttaccccatcagtccccattacaacctctgacagctgccgccctagctggatccctaggagtctgggtacaagacacccctttcagcactccttttcacttttttactttacatctccagttttgcctcacacaaggtctcttcttcctctgtggatcctctacctacatgtgtctacctgctaattggacaggcacatgcacactagttttccttacccccaaaattcaatttgccagtgggactgaagagctccctgttcccctcatgacactgacatgacaaaaaagggttattccactaattaccttgatggttggtttaggactttctgcctccactgttgctctcggtactggaatagcagtcatttcaacctctgtcacgaccttccgtagcctgtctaatgacttctctgctagcatcacagatgtgccacaaactttatcagtcctccaggctaaagttgactctttagctgcagttgtcctccaaaaccgctgaggccttgacttactcactgctgaaaaaggaggactgtgtatattcttaaatgaagactgttgtttttacctaaaacaacctggcctggtgtatgacaacataaaaaaactcaaggaaagagaccaaaaacttgccaaccaagcaagtaattatgctgaatccccttgggcactctctaattgcatgtcctgggtcctcccaattcttagtcctttaatacccatttttctccttcttttattcggaccttgtatcttccatttagtttctcaattcatccaaaactgtatccaggccatcaccaatcattttatacgacaaatgtttcttctaacaaccccacaatatcaccccttaccacaagatctcccttcagcttaatctctcccactctaggttcccatgccacccctaataccgcttgaagcagccctgagaaacatcacccattctctctctccataccaccccccaaaaattttcactgccccaacacttcaacactattttatttttcttattaatataagaaggcaggaa

SEQ ID NO: 326 - DNA, 8426 bp, Homo sapiens
  misc_feature (101)..(101): n is a, c, g, or t
  misc_feature (136)..(136): n is a, c, g, or t
  misc_feature (179)..(179): n is a, c, g, or t
  misc_feature (345)..(345): n is a, c, g, or t
  misc_feature (348)..(348): n is a, c, g, or t
  misc_feature (373)..(373): n is a, c, g, or t
  misc_feature (843)..(843): n is a, c, g, or t
  misc_feature (1007)..(1007): n is a, c, g, or t
  misc_feature (1108)..(1108): n is a, c, g, or t
  misc_feature (1183)..(1183): n is a, c, g, or t
  misc_feature (1288)..(1288): n is a, c, g, or t
  misc_feature (1334)..(1334): n is a, c, g, or t
  misc_feature (1355)..(1355): n is a, c, g, or t
  misc_feature (1405)..(1405): n is a, c, g, or t
  misc_feature (1411)..(1411): n is a, c, g, or t
  misc_feature (1436)..(1436): n is a, c, g, or t
  misc_feature (1621)..(1621): n is a, c, g, or t
  misc_feature (1659)..(1659): n is a, c, g, or t
  misc_feature (1667)..(1667): n is a, c, g, or t
  misc_feature (1808)..(1808): n is a, c, g, or t
  misc_feature (1972)..(1972): n is a, c, g, or t
  misc_feature (2377)..(2377): n is a, c, g, or t
  misc_feature (2527)..(2527): n is a, c, g, or t
  misc_feature (2846)..(2846): n is a, c, g, or t
  misc_feature (2855)..(2855): n is a, c, g, or t
  misc_feature (3028)..(3028): n is a, c, g, or t
  misc_feature (3157)..(3157): n is a, c, g, or t
  misc_feature (3234)..(3234): n is a, c, g, or t
  misc_feature (3253)..(3253): n is a, c, g, or t
  misc_feature (3451)..(3452): n is a, c, g, or t
  misc_feature (3580)..(3580): n is a, c, g, or t
  misc_feature (3586)..(3586): n is a, c, g, or t
  misc_feature (4006)..(4006): n is a, c, g, or t
  misc_feature (4041)..(4041): n is a, c, g, or t
  misc_feature (4834)..(4834): n is a, c, g, or t
  misc_feature (5199)..(5199): n is a, c, g, or t
  misc_feature (5509)..(5509): n is a, c, g, or t
  misc_feature (5723)..(5723): n is a, c, g, or t
  misc_feature (6144)..(6144): n is a, c, g, or t
  misc_feature (6246)..(6246): n is a, c, g, or t
  misc_feature (6343)..(6343): n is a, c, g, or t
  misc_feature (6350)..(6350): n is a, c, g, or t
  misc_feature (6353)..(6353): n is a, c, g, or t
  misc_feature (6367)..(6367): n is a, c, g, or t
  misc_feature (6430)..(6430): n is a, c, g, or t
  misc_feature (6625)..(6625): n is a, c, g, or t
  misc_feature (6763)..(6763): n is a, c, g, or t
  misc_feature (6800)..(6800): n is a, c, g, or t
  misc_feature (6809)..(6809): n is a, c, g, or t
  misc_feature (6815)..(6815): n is a, c, g, or t
  misc_feature (6847)..(6847): n is a, c, g, or t
  misc_feature (7080)..(7080): n is a, c, g, or t
  misc_feature (7293)..(7293): n is a, c, g, or t
  misc_feature (7343)..(7343): n is a, c, g, or t
  misc_feature (7792)..(7792): n is a, c, g, or t
  misc_feature (8080)..(8080): n is a, c, g, or t
  misc_feature (8214)..(8214): n is a, c, g, or t
  misc_feature (8221)..(8221): n is a, c, g, or t
  misc_feature (8264)..(8264): n is a, c, g, or t
  misc_feature (8293)..(8293): n is a, c, g, or t
  misc_feature (8358)..(8358): n is a, c, g, or t
  misc_feature (8372)..(8372): n is a, c, g, or t
  misc_feature (8383)..(8383): n is a, c, g, or t
  misc_feature (8421)..(8421): n is a, c, g, or t
  misc_feature (8424)..(8424): n is a, c, g, or t
tttctggtgagccagccaggagtggagacaacaggtttgctgtctcctttgcctgtgggtctggggccccgggccgggggagacctgtgaccccaggcgcngcctcggggaacttcaacccggaggagagatcggntctcccgtgacccggtgcccctccccgacagcgcaacggaacntaaggggctacgggatgattccagggacagcgtgctacaggaccgcggtaaggtttggggcccaaggcaggacccgtcccataaggacggaaggggagcctgatcacctcccggggtgtgcctagtaatccgacccaggagctgggggtggcgagagtggctcgcnaantcggatgaaacctacaccccaaccnagaagaggaactgggagtggggaagtgtgtgaatgcgtgtgaaagaggcggttccagaaggagccaatgtggggagtgacgtgtggggccgcaggtctcttagcgtagaccgtacgctccgagcgaagtgtgggaccgaccgggactagtggcgaatgtcctccggggctaccacatatggcttagggaggcgccccacaatttagtgattgtggtggtccgggttcggggctcatacgaaccctccattaaagctaagcggcgtctgaaaactcccgcgagggagatggtctaatcggtctgaagcgaaagtaaaagagtgagtgtgttgcgccgtaactgggaggaaatgggagggaagtcgtcaaaacccaccccattagaatgtatgttaaagaactttaagaaaggttatgcaggggattatgggatcaagttgaccccccagaggttgagaactctctgtgaantagaatggccctcttttggtgtcggatggccggccgaaggaactatagatagggaaataattggccgtgtatttaaggtggtgactggggtcggaggacagccagggcatccagaccaatttccttatattgactcatggctaaatatagtccaaacccgaccngcgtggctgcagccctgcctggcagcttattgcaaaacgctcgtggcccgagccgagcctaaagtgaaagaagaatcagcttcgctggcagctacggaganaaagggaaagccacaggaaggcaagagaaaccagttttgcgggaaccaccagaggagacagaaattcttcctccntatatcccaatctacccccctttaccgaggccaatggcccccgaggagtcaaattcagatggtgacacgccccgggcctcaccccaaagggaagaatcggagccncaggaggtcagggaggaaagtcaagatgatcaagcgggccgcctcnagtctggccacgcccgggctntgcaaatgcctctcagggagacgcggggacccatctattatgatgaacanggccangtccaaggggggcaatggaccttcntctaccagcctttttcaaccactgatctcctaaactggaaacaccatattccctcctacacggagaagccccaggccctcatagatctgatgcagtccatttttcagacacacaatccaacctggccagattgcaagcagcttctcctgacgctgtttaataccgaggagcacggaagggtgacncaggcagccctccactggctagaagccaatgcaccagnaggcacanttaatgtccaggcatacgctcagggccagttcccagaagcagacccccactgggacccaaatgatgcaacccagtttcagcacctgcagaggtactgagaggcactcctgcaagggctgagggaaggcgggaaaaaggcantcaatatgggaaagatctcggaggtgcttcagggagcagatgagagccctagccagttttatgagagactctgtgaggcattccggctttacaccccgtttgaccccgaggccactgagaatcagcgcatggtgaatacggcatttgtaggacaagcccagggngacatcaggcgaaagctgcaaaagctagaaggttttgcaggcatgaatgccacccagcttttagaagtagccaccaaggtgtacgttaaccgcgaccaggaggcaaaaagggaggctgatcggaggcttaggaagaaggccgatctgctggcggcagccctcacggaaagggaagctagcatcgcgagaggacgcggacgcggacgcggacgtggaaggggccaagttggacagagacctgaaagtcagccgagactagatagggatcaatgtgtgcggtgcaaaaagaagggacactggaagaatgagtgtccagagggcaatgaaggaaatggccaaggccgtgagacgagaaggccgccagccaagggctgccgcaccctgagggagccagacactgacctnatcgggctggcagggactgaaggatatgaagactaggccagaccgggctccatctccttaggcccccaggagcccatggtcacagtagaagtagggggccaactgatggactttatggtagacaccggggctgaacactcggtagtgacncggcccatagggccactatccaaaaactatacgactattgttggggctactggggtcccagagaagaggccattttgtcggccaaggaggtgtgtcataggaggacaagaagtccagcatgaattcctatacctcccaaattgcccagttcccctgctgggaagagacctactccaaaaactgcaggcacagattgcttttgggccacaaggggatatgactttaaacctgactcacccaaaggccatggtgttaacccttaccgtcccacaggctgaggaatggagactatacgcaaaagagtcgccagaaccgggantaaatgaantgtatgggctacttagtaaaattcctggagtatgggctgaagataacccacctgggctggctgtaaatcaggcaccagtggtagtagagctaaaaccgggagcaactccggttcgggttcgtcaatacccgcttctccgagaagccatacggggcattcacaaacatttagantggctcttcaaacacaggatcttagtccgatgccagtcaccctggaacactccactcttgccagtacggaagccagggtctggtgaatatagaccggtgcaggacttgcgtgctataaaccaggctacngtgaccatccacccagtggtaccaaacccgtatactttaatgggacttattccagcaagtgccgcttggtttacttncctagacttaaaagatgcntttttctgtctccgcctggcaccaattagtcagcccatctttgcatttcaatgggacgattgagtcacaggcacaggggagcagctcacctggactagactcccacaaggattcaaaaactctcccacaatctttgaagaagcactggcctcagacctcaaggcctacaccccgccaaatgataactgtgccttgctnnagtacgtagacgaccttcttctagcagccccaacccgagaggactgctaccaaggaacccaagacctcctccacctcctatggaaagctggttataaagtattcaggaagaaggcccaaatttgccangaaagngtcaaatatctaggcttcatagtaagccaaggggaacgccggctcggcagtgaacgaaagcaggctgtttgtgcgctcccaactccaaccacccggtgtcaaataagagaattcttgggggcagcagggttctgccgtatctggatcccaaatttctcactaatggctaagcccttatatgaagccacaaagagaggggaaaggaagcccctcctctgggaggctgaccaggagaaggcatttaaacaaatcaaggaagccttaactcaggccccagccttaggactgccagatataactaagcctttctttctatatgtccatgaacgaaaaggaatggctataggggtcctgactcaagtcataggatcatggcatcgcccggtggcatacttatccaagcaactggactccgtggcnctaggatggcctccttgccttagggcactagctgncactgccctactggcacaagaagctaacaaactgactctaggacaacagctgaccatccgggtataccacactcggttataactttaatggaccagagagggcaccattggttatcaaatccgagaatgactcggtaccaggggctcctatgcgaaaatccccacataactttggaaacagtaaacacccttaacccggccaccttgctcccgatcgaaccgggagccccccttcatgactgtgtggaaacagtagatgaggtattctcaagccggggagaccttacagaccgacccctcggggacccagatgttgaatacttcacagatgggagcagtttcatactggaaggggtccgctgagcagggtatgcggtggtaacattggactcagtggtagaggctcagcctctgcccaccggaacgtcggcccagaaggcagagctaatagccctaacgagagctcttttgctggcgaaagacaaaaaggtcaatatttatactgactccaagtatgcttttgccacgttgcatgttcatggggctatatataaagaaagaggactcttaactgcggagggaaaaagaaataaagtacaaagaagaaattctacagctcttagatgctgtatgggccccgaagaaggtagctgttatgcactgcagggggcaccaaaaggcaggaacactagaggccaaaggaaacagaaaggcagacagggaggcaaaacgggcagcaatgactactccgcactctaaaaaggaagccctagctatgcctctcctcccagancctcccctcccagagatcccaagttactctccaaatgagaaggcctggtttgcccaagaatctggaaaatacattgaaggaggatggtggaaattctccgatgggagactagccatccctgaaatggtggcccctaaatttgtaaaacaattccaccaaggaactcacatggggaaaacggcactagaaacgctactaggacgccacttctatgtgccacggctcactgccatcacccgagccgtttgcaaacaatgtctaacttgtgcccagaacaacccacgacaagggcccacttggccccccgggaattcaggaaatgggagccacaccctgtgaaaacctgcttatggacttcaccgagntgccccgagcggggggctatcagtacatgctggtgctcgtctgcaccttctcgggatgggtcgaggctttccccacccgaacagagaaagcacgagaggtgaccaaagtactgttaagagacgttatccccagatttggactgcccctaactctggggtcagacaatggactggcatttgtagccgaaatagttcaggaactaacgcggctgttaaaaataaaatggaaattacacacagcctaccggctgcagagctcaggaaaagtggagcgcatgaactggacactcaaacagctactgaagaaatnttgtcaagaaacccatctgagatgggatcaggtcctgcccatggtcctcctccgagtcaggtgcacccccaccaaacaaaccgggtattcaccctatgagatcttgttcggccggccacccccaatcataggtcaaattaagggtgatctccgtgaactaggggaactgactttaagaaggcaaatgcaggctttagggatagccatgcaggangtccatggctgggtacgggaaagaatgcccataagcctgacagacccggcacaccccttcaaacctggggactctgtttgggtcaagaaatggaatccaaccactctgggacccatatgggatgggccccatactgtaatcttgtccactcccactgctgttaaagttgcaggaattgtgccttggatccaccacagtcggctgaaaccggcagcccgagacaagtggaccagccagcaggacccagaccatccgagccggctgatcctgcgacgggaccgagttgccactgagagacgacgacagccctgctctggtcactccggaagctgaccagtctacgcacggccgaagcttgaggaggcaacagccctgctctagtcaccctggaagctgactagtctacgcatggccgaagctngagtcatcatcagggaagtaaatgtggttagaaatcttaagtccagtagccttccttataatactagttgttttactattgttctgtcgctttgctcaaccncctcccccgggtaaagacctcttttgtccctgccgggtataaacatgctactctttacttatttgttccggcgtaggaagctacacctttcctcctnattatgncgntccccttatctgtntcaggagaggagaccatagaagagtgcccacactgcactcacactacgtggtcagggagcacnataaccagaaccctgttataccacacttactatgagtgtacagggacccacctaggaacttgtactcacaaccagacgacctactcagtctgtgacccaggaaatggccagccttatgtgtgttatgaccctaagttcttacctgggacctggtttgaaattcacgtgggtcaaaagaaggaaaccttctaaacnaaaccaaggtccctccctcccacaagggagccatatccttgtactttgatatttgccaggcaacatccataggctcaacctttcccgtaatctctagttccgaagagtactataatagctgccacaaaaatatatgtncaccccctgctttctccgccagttccccggaaacaanttgctgggnctgcanaatcggtcctgtaacctgcaatcactggggcnagtcatgcttaccaaaataccagcagaaccagactgtaaggcaagcacttgcagtcctgtaaatctcaccaccttggagccaaatctggccgtatggactacaggtttaaaagcaccctaggaatacaagtcagcagccaggaaacagactcaagagtctatttacatattatcaaaaaacctcggacccgtccacccgaaaattccagtttttaagtcattctatgagcatntcaaccaggagttgcctgagccccctcctttgccagaaacctattagctgtggatcgtttgcatgttcaactggctgaaaacatagccagcagcctacgtgtctcctcatgctatgtctgtggagggaccaacatgggggaccaatggccatgggaggcaagagagctaatgccccaagataacttcactctactgtctcttcccccgaaccngcgctcacgagcccgagcgtctggctgttaaaaacctctattatcggaanattctgcattgcccgctggggaaaagcctttacagacccagtaggagaattaacttgcctaggacaacaatattacaatgagacactaggaaaaactttatggcggggcaaaaataattccaaaccaccccatccgggcccattctcccgtttcccctctttaaaccactcttggtaccaacttgaagctccaaatgcctggcaggcaccctctggcctctactggatctgtgggccatgggcatatcggcaactgccagccaaatggacaggggcctgtgtactgggaacaattagaccgtctttctttctaatccctttaaaacaaggagaagccttagggtaccctgtctatgatgaaactaaaaggagagacaaaaaggggtataaccatagggaattggaaggacgattaatggccccctgaaagaataatccaatactatggnccagccacctgggcagaagatggaatgtagggataccgcacccctatttacatgctcaaccacatcataaggttacaggcagtgcttgaaatcattactaatgacactgcaaaggccttaaatctgctggcccagcaagccacaaaaatgaggaatgctatttatcaaaatagactggccttagactacctcctagcccaggaaggaggggtatgcgggaagttcaatctaactaattgctgcctagaaattgatgacaacggaaaggtcatcaaggatataactgcnaaaatccaaaaattagcccatgttccagtccagacttggaaaggatggtctccagattccctctttgggggctggttttcatcccttggaggatttaaaaccttagtaggaatagttctagccatactaggagnctgcctnatactcccttgcctcttacccctccttgttaagaacatccaancagccacagaggctcttgtagacaaacanactaccactcaactaatggctctaactaaatatcaacccttgccaaatgaagagaactgccttcncatgaagaattaantagtagtgatnctttctattaaacctcatttataaaaagcatcaaaggnggnaa

SEQ ID NO: 327 - DNA, 3853 bp, mouse
agtggtgccgaaacccgggacccgactcccccaccgaagaggttcagaactttctgcagtcagggtctgtcgacaggatgagtacggtaagtaactcaccatcccggggttgggattaggctctcggtaaagagacaattaggctctcggtaaagagacaataaggctctcrgtaagagacaataaggctctcggtaaagagacaataaggctctccggctctggagacgagaaagtgaaagtaagagagactaagtagggtaatagggacagtctatyctttggctctggcgactrtgggaagggaaaagcagtaagagggtawtagtcaaagtaacacaaasttcyyaggaattgagagccgctmaggccaggggctctgggggacagaaggtgatttatagatcatcatctaggttytgtttaaaaggccccggatatttcatggccattttggaattacagttttctttttgggcaattttgctccagaagttcattacagacaagaaaagtcctagccatttcttcagtattttgggtaaaactgatcatattcatctggtgtttttctgkctcttcccccgtcctgttggtgttcttcagccaaaactgtaagatatgtttgatttgkgtaccaagtagtttcagcagtttcaaattactgtttaaatattgctgttttttctttttcctttattcattttrgtaatttttgacttcagctttttcattacaaatggatcaggtccggtatggagttacaggtggatggaaaatccatcttggggcttttagatacgggagctgataggtccataattgcaaggaaggactggccaaaaggatggccgattcaggagtcagaacaaatattacaaggcctgggctatgcaaagagcccagacataagtgccaggatgctcccttggaaagataaggaagggcatgatgggatgtttcaaccatatgtgcttgagctgcccattaccttatggggtagggatttgttgaaaaatctacaattaagacttactaatgaatattctgatgcctcccagaagatgatgaaagacatgggatggcacccatccttcgggttgaaagggttgcaagaaggaagtccgatttctcaattaaaagaaagcctcgggaaggaatgggtttttcctaggggccatgggggatgcattcccataacctggaaaactgaggagctggtgtgggtgcctcagtggccattatcaaaaattacgagctaggaattagttgcaagataaaatagtgtcctatttaggagcaaggatcgcccctacggccgtttggcctcaaaagatacagttgagggttgattccttgcatactttaaatgattttcagaaattgttaggcgatatcaattggattcggccctatttgaagatcccaaatgttaaattaaaacctctgtttcaaattttagaaggagactcagagttaagttccaaaagggaattaacacctgaggctagaaaggcccttaccctagtggaagaagaattgattaaagcccagcttcagcgttgtagagaagggttacccatcattttgataatattacctactgagatgcaacccacaggattattgtggcaagaaggcccattgttatggatccattccaaaatatccgctgggaggacattagatcattaccctacaacagtggcttctttagccttgttgggaattcagcattgtttacaattttttggtataaaacccagctctattgtaatcccttatgatgggtatcagcaaaaggtcctaacagcaaatattgatgagtgggctattttagcctgtattaatgagggcccatttgataatcattatcccaaacatccgttaatgaccttttttaaggaacatccagtcattttccctcaagtggtgaggaaaacacccattaaggatgcagttaacgtgtttactgatggatcaaaaaccggatgtggagtatatatggtagaggggaaagatcctgtggtcaggcagtattatccctgtactccgcagatggtggaattacaaatagttattgaggtcattaaggattgtgattttccttttaatctaatttcagattcacaatatgtagttaatttagttttatccctagaagtggctggccaaataaaagctcgtagtaccatccaagccttggccttacaattacagaagttgctgtgggaaagacgccaaccattatatattggacatgtccgtgcccatagtgggcttccaggacccttaagtaggggaaatgatattgtggataattgtactcgtatggagttcatatttttagcatcccctatggagttagcctcacaatttcattctaaatttcatgttaatgctaaaactctgcagagaaaatttggaatctctagagcacaagctcgggatgtagtcactacctgtggacgttgccttgagtttcaacacccgccttcttatggagtgaatcctagaggattgctccctctacaggtgtggcagatggatgtgacacatttttcagaatttggcaaattgaaatacgttcatgtatccattgatacatgttcaggaatagtttatgcatctcccatggcaggggaaaaggcctcccatgttatacagcattgtttggaggcctgggcagcttggggtaaaccccaacaacttaaaacagataatggccctgcatatactgccaaaaccctggtgtctttttgtcaacagatggaagtacaagttaaacacggcctgccatataatcctcaaggccaaggaatcattgaacgagcacatagaaccttaaaagaattattaataaaacaaaaagggggaataggctatggccataccccaaagataagactctccttagctctttttaccttaaattttttacaattggataaggaaggtcgctctgctgctgaacgacatgctaataccagccccagtaaactggggtatgctaaatggaaggatgtgcttacaggatcatggaatggtccggatcccgtgttggcctgggcgagagggtctgtttgcatgtttccacagaatcgcgcagagccagtgtgggttccggagcggctagtgcgacgctgtcaaaatgaagaagctgatcttgctggtgatgagcatgtgtctgcccctgatgggtgcggaacccagatgggggatactgtcggtgtttcccaggccgatgcctcttcgtcatgatgcttcctgttaagaaattcctgttaagaaattggactgcaaattttgatggcaagatgaatgagcttcgctcggcgattgtcactgtgaattctacccgagtggatcctggcttggcatcgggaaagaatgggctgggataggtgccctcgctgtggcccttgttttggcatgcatgttgtgtgtatggtgtatgtgtcggttgcggaatgcccaggtccgcactgccgccatggtggtgcaagcttttgccgcagtggaagcagggcagtcacctcagatttggcttgttgccatgaagaatgaacaatgaagccatcgctccgcagggttgtaaggctaagcactgcacagaggttagtctggaagctgtttgacaatctctgggaggtatgtctgattgcatgagggttgagtgtcctagtgtccttcccccaggaaaaacggcacgggagcaggtcagggttgctctgggtaaaaacctgtgagcctaagagtcaatcctgtacatggcccctatttctgcacactggggatcagacctctatcttcacccacggagcttgcttcaaaagaatataaaagggggaat

SEQ ID NO: 328 - DNA, 345 bp, mouse
  misc_feature (169)..(169): n is a, c, g, or t
  misc_feature (330)..(330): n is a, c, g, or t
tgtgaggagccgcccttgcaatcgccattacaagatggcgctgatatccggtgttctaactggtaaacaagtagtctgcgcatgtgctggggtatttttccattccttgtgccctgcctgtcccgtggcgtcatctgggctgatagtgagcagccagtcagggtgaaanacgtctccaaccgctcttgtggtctatttaaggaccgagtttcctgtgttctgggcctcctcccccagaagctgatgatctttctctcgagatgcattaaagctatgctgcagaagaacccgtgtgtgtcctgtgtgtgtgtcctcgctggcgagactccntatcacacagggaca

SEQ ID NO: 329 - DNA, 334 bp, mouse
attggtgccgaattccgggacgagaaaatccgggacgagaaaaaactccggactggcgcaggagggatacctcattccagaaccagaactgcgaatcaaggttataaggttcccgtaacacagactgttgagaaggattcaactgccgaattcagaactcatcagctggggaacgacggtgataaaggttcccgtaaagcagactgttaagaaggattcaactgtatgaattcagaacttttcagctggggaacgaggtaagtctgatcttgaactttctaaggaaattcaagacagtctatcagaagtaaagtggaaaatggctttacaagtt

SEQ ID NO: 330 - DNA, 385 bp, mouse
  misc_feature (103)..(103): n is a, c, g, or t
tgtggagagccggtacgtgccgcgagcaatcgcgtgcgtgccgccagtaatctctgtggagagccgtgtgtgccgcgagcaatcgccattataagatggcgcnggcctccgctgtgcctaactagtaaacaagccttgtacgcaggtgcgagagtgaactcactcctagtcactcccattctcggggtgtaatagtggggtgatgggcaagcaacgaatcgggagctgtcacgccatatcaggtgctgaaacgtcacgctgcgggctataaaagcggcgccattttcccggttcggggtcttcctgaagaagcaagcaataaagcttttgccgcggaagattccggtttgttgcgtctttcttgccggtcgagcgggacgcaata

SEQ ID NO: 331 - DNA, 356 bp, mouse
tgtggagagccgtgccgcgagcaatcgcgtgcgtgccgtgagcaatcgccattataagatggcgctggcttccactgcgcctaactagtaaacaagccttatgcgcaagtgcaagagtgaactcacgcctagtcactgcccatctcgcggcgtagtaatggggtgatgggcgagcaacgaatcaggagctgtcacgccacatcaggtgctgaaacgtcacgctgcgggctatataagcagcgccattttcccggttcggggtcttccctcctgataagtaagcaataaaagctttgccgcagaagattccggttgtcctgagtgtgttcttgccggcggggacaaaagctcgggat

SEQ ID NO: 332 - DNA, 7680 bp, mouse
agtggcgccgagaacccgggaaacataccatcaccaggcgctgataggagaccctcccttttcacggggcgggttcagaactacgggacactttacagctctgcaaggtatgttcggtcttgaaatttctccagagttagaggcccttttgtttgttttcacggggcttattctttttcttttggttgcgttctgcttccaccggtggaactgctgactggttctcagtcgcggtcaggcatggttagataaaagagcagtatgggaacttcccactctgtggtgaccgccttacacggtcggtcctgaagcagcgtggcctgaaagtcgccactaagacactagaaggctttgtaaaagagatagatcgcatagcaccgtggtatgcgtgctcagggtccttaactatcccctcttgggagaaactgaagggagatttagttagggaacagcagaatggcaaacttaaagcagggaccatgccgttgtggaagctgataagatcgtgcttaaaggacgaggaatgtcaacaagtggttaaggcagggcagagaatactggaggaaattcaagacagtctatcagagacagagcggggagagagattaggagctcaaaagaaaaaaaggtgcaccaaataagaaaacaggcctttccacggaccttgagcccgaggaaaagagaatctagggaaagaataccctgggagagtttagaaaaaaggatgagaaggaagagaagaagaaagatcaatctggggaggtccctaggagaaggagcctctatccgccattagatgagtttaaggctctagctcttagtagctcagaatcagatgaggaacttagcccctctgaggaaacagacttagaggaagaagcagctcgttatgaggaagaaagataccatccagatgaaaggcgagctaatcagtcacagaaaaagccaaaagcggctggagacaaaagtcagctcaagccagcttgctgctcggcctccgggccgtcggcctctgggtcctagtgcacctccgccttatgtgcagaggtatcattcagactcattcattccaaaagaggaacagagaaaaatgcaacaggcatttccagtctttgaaggagccgatggagggcgagttcacgctccggtggagtatatacagattaaagagcttgctgagtcagtccgtaactatggagtcagcgccaatttcactatagcacaagtcgaaaggcttgctactttggcaatgactcctggagattggatgactgttgtgaaagctgcagttcctaatatgggaatgtatctagagtggaaagcattgtggcaagattcctgccagacacaggcaagggccaatgccaccgttgaaggggaccaaagaacatggacttttgaattacttacaggtcagggacaacacgctgctaaccagacaaattatcattggggagcgtacgctcagatctcagctgccgctgttaaggcgtggaaagcactctctaggaagggagaggcaagtggacatttgacaaaaattatccagggcgcacaggagtcattctcagactttgtggctagaatgacagaggcagcagggagaatatttggagacccagaggcagctatgcctttaattgaacagttggtttatgaacaagctacgcaggaatgcagagcagcaattacacctagaaagagtaaaggattgcaggactggttaaaggtttgccgtgagcttggagggccgctcactaatgctggattggcagccgccattctgcaggggcagaggcgctcagacacagctgagctcaaactttgctataattgtggcaaaccagggcacttttaaaaaaggactgcagagcccttgtaaaaaggacagcgccagggttgtgtactaagtgtggaaaaggatatcattgggccaaagattgtcgctcaattaaagatatacgaggcaggctcttgcagccaggaccccctcaagcagtagaaaatgagaatgaaggcatttcaaaaaacgagtttcgggcccccaggtcccagggccccaaaacatatgggaccccgacgggcaacaggtggacaccacagtccgcagggcaacagaaggctcagctggattggacctccgtgcctccacccgattcatgctgatgccccagatgggggtgcagccaattcctactgactataaggggcctctgccatctggaagtgtcggcctaatactgggccgggcctccctcaccttacaaggccttattgtccaccctggagttgtagatcaggattatgaaggggaacttcaggttctctgttcctgccctcaaggtgtcttttctatatcacaaggggatagaatagctcaactaataattttgccaagcctacatggcctgttttccctcctctggtgtccctcgagctgccagagggattggttctactggaaatgattctgcttacttaataatgtctttagattccaggccatccttagagttagttatagaagggaaacaatttaaagggatttttagatacaggagcagataaaagtattatctcttcccactggtggccaaaagcctggcccgtcactcagtcatcacactctttacaagggttaggctatcagtcctgccccactattagctcccgttctttgagctggcaagcacctgaaggtcaaacgggacaattcactccttatgtcttaccactcccagttaatctctggggggagagatattttacaggcaatgggaatgaccttgactaatgaatactcaccacaagctgttcaaatgatgaagaaaatgggctatacagaaggaaaaggattagggaaaggagagcagggtagacttgaacctatcccctcaagaaggtaataatgggagacaaggtttgggtttttttctagaagcggctgttgagggttccatgcccataccatggcttacagaggaagctgtatgggttcctcaatggcctctttcctctgaaaaattagaagcagccacaaaactgatctctgaacagctacgcttaggtcatttagagccctctacctcaccctggaatacacctatttttgtaattaagaaaaaatctggcaaatggcgcttattacatgatcttagagcaattaatgcacaaatgcgcctgtttgggtcagttcagcgagggctaccattgctttctgccctacccaaaaattggggaaattataattatagatattaaagattgttttttctctatacctttatgccctcaagataggcaaagatttgcatttaccatcccagccattaatcatttagagcctgatcaaagataccaatggaaggtcctacctcaggggatggcaaatagccccaccatgtgtcaactgtatgtgcaattggcacttaagtcagttagaaatcattttccatcattacttctggtactttatatggatgacattctgatttgccataaaaattcacagttattgcaagatgcataccctatattaataaaaacattagggcaatggggattgcaggtagccaccgaaaaggtgcaagttgctcaaatgggaaccttcctagggtcactcatttatcctgacaaaattgttcctcaaaaattagagattcgcaaagatcaactacataccttaaatgattttcaaaaattgctgggagatattaattggctgagaccatttttgaaaattccatcagcagagttaaagcctttatttgatatattagaaggagatactcacatctcctcccatagagcacttaccccagctgcatgtcaagctttacaaactatagaaaaggccttacaagatgctcaattacaacgcattgatgagtcgaagtcatttgaattgtgcgtattaaaaaccgcacagttgccaacagcagtcttgtggcaaaatggacccttattgtgggtccaccctaatgcttcccctgcaaaaatcattgaatggtatcctaatgcagttgctcaacttgcacttaggggaataaaagcagccattactcattttggaaaagaacctcatatactaattgtgccttatacctctgctcaagttcaaaccctggcagcaacaactgatgattgggcagtcttagttacctcctattcaggacaaattgataatcattatcctaaacatccaattttacagtttgccttaactcaagccatagtgtttccagtaattacagccaaacacccacttgcagatggggtggtagtatatacagatggatccaaatctggcataggtgcatatgtagtaaatgaccaagtaacatccaagcaatataatgagacatcaccccaggttatagagtgtttagtggtactagaggtccttaaaactttcccaggaccgcttaatattgtatctgattccttatatgtagttaatgcagttaatacacttgaagttgctggcttaaataaaccatctagcaagcttgctcacatttttcaacaaattcagtcagccttgttacatagaagacatcttgtctatattactcatgtcagggctcattctggccttcctggccctatgtctcatggaaatgacttagcagacaaagccactagaatcgtggctgctgctctgtcctcgcaggcagaagctgcaagggaatttcataaacgctttcacgtgacggctgaaactttacgccgccggttttactttaaccagaaaagaagctcggacattgtcacccaatgtcaaaactgttgtcaatttttacctactcctcatgtaggggtaaacccccgaggcgtcaggccattacaggtctggcaaatggatgtcactcatatttcctcctttgggagaaatcaatatttacatgtttctattgacacctgctctggtgtaatgtttgccacacctttaacaggtgaaaaagcctctcatgttatacagcactgtttagaagcctggagtgcttggggcaagcccacaatccttaaaacggataatgggccagcatatacttctgctaaatttcaacaattttgtcatcaaatggatgtcactcacctgactggccttccttataatcctcaaggacaaggcattgtggaacgtgcccaccgcacactcaagtcttattttataaaacaaaaagggggagttgatgagactctgccctcagtgccaagagtagctgtctccatggcactcttcacacttaattttttgaatcttgacgagcaaggacgttctgcagctgatcgacatagctcagaccctgatagaccaaaagaaatggtcaaatggaaggatgttttaactggtctgtggaaaggcccggatcctattttaataagatccaggggagctgtctgtgtttttccacagagtgaagacaacccattttggctgccggaacgactcacccgcaagatattcatcaaggatggtgtggaagatgctgacctcccgaggactgcttctgatcctgacaatgctgaacttgtctcaggttcctagtataatgggcgaacagagatgggccattctctcggctttccctaaaccaatgccagttcgccatgatgctatagtttttccaaaattctttactactaataaaacagtggatttgccatatctaccctatgatcccacccgagcaccattaggagaaaatcgctctttactagaacagggttctttatgttttcaaattaatggaccagggaaaatgtatcaacctcacagcccgagccttgggaatgtttaataagcaccgaggaggcttggtgagcacaacccaagatacttccaacgcagatataaccattattcaaatcacatggaccttctggcaggaggcaatttgggttaatggtacatttctaccacctaacttttcaaacaagtcagaacgttccccaccaaccaagaatagccccccattgtagtttggaagatgaagggctgatcctgccatggtctgattgtcaatcctccatcactcgttgggcagatcagagtaaaaccttttccttttctcccaacatgatggttgacccagagaaggaatttgttatgaaaaagggacttttcatacaggacattagaatgcatccctttcacaagtggctgctttgtggagtcaatggcagttgtacagaactcaatcccttgatttttatccagggaggagcagttggaaaggcttcttttactggcatctcaagatttgctcagtattggggaatacatgctgcctccctggactacttatggatatactatataatacccagtgtagagatcactgggttcaataaaactttgataaaccagactaattatctacctaccccagtctgtgtttacccccctttcttgtttattctttcaaatgattcatttgaagactgtttaaatgattcttgttggatttctcaatgttgggatgtaacaaaggacacccgcgccatggtggcccggatcccacgttggatccctgttccggtggaaacaccctccaccttatccctgtttagacaaaaaagagatttttggcattactgctgccgtgatcatagcaatttcagccagtgcagctgctgctacagctgcagggtacgctatggctagtacggtccaagcaggcacaaaattaaatcagctttcagtcgatctgactgatgccatcaatgtccaaacttctgctagtgcccagttgaagggagggctgatgattttgaatcagcgccttgatctggttgaggaacagaataagtgttctataccagttggcccagttgggttgtgaaagaaaattgggtgctctgtgtattaccagtgtccaatatgaaaattttactcgtgcagctaatctgtctagacagctttccttgtatcttgcaggaaattggtccgaaggattcgatgagactcttgaggccctgagggcggcagttttaaggatcaactcgacgcgagtggacctgtcattgacagagggcctctcctcctggatttcatctgcattttcttattttaaggaatggggtggggggtagttttaatttggtgctgccatctgctgtggacttgtgttcatgctctggttggtttgcaagctcagagcccaacaaaaacgtgacaaggtcgttattgctcaagcacttgcagccattgaacaaggggcctcccctgaaatttggctatccatgcttaagaattaaatggcatttgagttctctgctattgcatcccacggatttgtggatccattgcacctgggatgagagatactcaacgctcattgatcagcacttgcacttcgctgaggtttcctcttgcacgcgatagggtgatcatgatttccccactaattcattttttggctggcctcttttatagagttcgccctaggtcatttagcagttactgtcacacagtactgtggtatccagagacgggcaactttcctcatgtacagaccaacctaagacacggggcccggtggcgatagggttaccctatgacaggaaaggctgtgacattggaggaatgacctaagacaggagccacagcagatggacataactgcagaggcctagaccagcctcaaattttaataaaaactaaaaagggggaga

SEQ ID NO: 333 - DNA, 332 bp, mouse
tgtggagagccgtgccgtgagcaatcgccattataagatggcgctggcttccactgcgcctaactagtaaacaagccttatgcgcaagtgcaagagtgaattcacgcccagtcactgcccatctcggggcgtagtaatggggtgatgggcgagcaactaatcaggtgctgtcacgccacatcaggtgctgaaacgtcacgctgcgggctatataagcagcaccattttccgggttcggggtcttccttatgttgaagcaataaaagctttgccgtagaaggatccggttgtccgagtgaattcttgccggcgagatactagctcgggcaaga

SEQ ID NO: 334 - DNA, 304 bp, mouse
tgtggagagccgtgagcaattgccatcacgagcctccgctgtgcctaactggtaaacaagtaatgtgcgcaggtgcaagagtaaattcgtgccaagtcactgcccatcccggggcgtagtagtggggtgatgagtgagcagctaatcaggagctgacacgtcacatggaggggtatataagcagcatcattttccttgttcggggttgttcttctttcgcctatgcaatcaatgctctcccaataaacgtgtgcagaaggatcctgttgcagcgtcgttcttcctggccagttgagcgcgtgca

SEQ ID NO: 335 - DNA, 7673 bp, mouse
cttggtgctagaaacccgggaaaaaacgccttaacaacgccggcacctagaggagaccctccgaccaaccggagcagatttcagaaccacggtggattttggaattccgagagcatgctgaatccttgtaagtaactctgatccttcttaatccctccccttaactggaaggcggcactaaaagccttttgttctcatgctggctgtgttaaccctatttctcccggtttgatcctgcactcaccagaagtggcgctgaaagaaaaagttttgaatgctgttaagcacggtcagacggacgtatataagccgcagtgcttgtctcatatttaagcctctcctgtagataagggagcagtatgggaaattcacattctgtaactacagctctacactctgttttaaaacagcgagagataaaagtttctacaagaaccttagaaacgttcattaaggaaatagaacgtatatcaccttggtacgcgtgttcagggtcgttaactctttcctcttgggagaaattaagggaagacttagctaaggaacaacagaatgggaaattaaaggcagggaccatgccattatggaaactggtgagatcgtgcctggaggatgagagatgccgtccagcaataataacagggcaggcaatattagaagaagtacaggacagtatggcagaaacggaatggtgtgaaaggttaagagctctaaaaaaggaaaatgtgcacaaaaaaaaaagcccttccagagaccttgagtcagaggaagtgaaaaatttgaggataaatcctcagggagagaaaaaggaaaaggagaaagttcagaaaaggaaaagcctttatccggtaaaggaactagaggctttgaagcttgatagtttaaaagcagatgagcttagctcctctgaggaagaggagtcacattatgaggcagctcattataaaaaagaaagataccatccagaggaaaggcgagtgaagaaatcagagaaaaaattaaaagttactggagacacagagcaggccacctctgggccttctagtctcaatacacctccaccttatgtggagaaattttattctgattcttttctttcaaaggaggaaaagaaaaaattatatcaggcatttcctgtctttgaagctgcagatggagggcgagtacacgcccccgtggagtatactcagataaaagaacttgctgagtcggttcgcaattatggagttagtgccaacttcactatctcccaaattgaaagatttgctactttagccatgaccccaggagactggcagacaacagtgaaggctgcactccctaatatggggcaatatatggagtggaaagcgttgtggcatgatgcttctcagacacaggccaaagtcaatgccactgctgaaggcaatcagagaaattggacatttgaattattaacaggacaagggcaatatgctaataatcagacgaattatgattggggagcatacaatcaaatctccactgctgccattaaggcgtggaaggcactttccaaaaagggagagtctggaagatacttgacaaaaattatacaaaatcctcaggagtcattctcagactttgtagctagaatgacagaggcagcaggcagaatttttggagactctgaacaggcaatgcctttagtggaacagttgatttatgagcaagccactcaagaatgcagagcagcaattacacctagaaagagcaaaggactgcaagattggttaagggtatgccgtgagcttggaggccccttatctaatgcagggttagcggctgccatcctgcaaggccaaaggcgttcagatacaaatagtaataacagggtctgctataactgtggcaaaccagggcatatgagaagagactgccaggcactcgtaaaagggaaagcgctagggctatgtaccaggtgtggaaaaggctatcatcgagccagtgagtgtcgttcaattaaagacgtcagaggcagatttattcagtctggacctcaggcagaaagaagtgaagacaattcaaaaaacgagtttctgggccccaggtcccagggccccaaaacatatgggatcccagctcacaacaggcggacactacagtccacggagctgcagaagtctcagcaagagtggatctctgtgccatcactcgattcatgctgacgccctcaatggggatgcagcccattcccactgacttcaaagggcctctgccatccagaagtgttggcctaatactgggccaggcctccttggctttacaaggcctcattatccaccctggagtcgtaratcaagactatgagggggaacttcaagttctttgttcctgtcctcaaggtgttttttcctatagcacaaggagataaaatagctcagctaatagtcttgccaagcctacatggctactccccctcccctggtgtccttcaagctgctagagaaattggctctgctgaaaatgattctgcttacttaataatgcctcttgattccaggccaactttagagttagttatagaagggaaacacttcaaagggattctagatacaggagcagataaaagtatcatctcttcccactggtggccaaaakcttggcccgttactcagtcatcacattctttgcaagggttaggctatcagtcctgccccactatcagctctcgcactctgagctggcaagcacctgaaggtcaaacgggaaggtttactccctatgtcttaccactcccagttaatctttgggggagagacgttttacaggcactaggaataaccttgactaatgagtactcaccacaagctgttcaaatgatgaagaaaatgggctataaagagggaaagggattagggaaaagagagcagggtagacttgaacctattcctcaagagggtaataaaggaagacaaggcttgggttttttctagaatcagctgttgagggttccatgcccataccatggattacagaggagaatgtatgggttcctcaatggcctctatcctctgaaaaattagaagcagccacaaaactggtctctgaacagctacgcttaggtcatttagaaccctctacctcaccctggaatacacctatttttgtaattaagaaaaaatctggcaaatggcgtttattacatgatcttagagcaattaatgcacaaatgcgcctgtttggatcagttcagcgagggctcccattgctctccgccctacctaaaaattgggaaattataattatagatattaaagattgttttttctctatacctttatgtcctcaagataggcaaagatttgcatttaccgtcccagccattaatcacttagagcctgatcataggtaccaatggaaggtcttgcctcaggggatggcaaatagccccactatgtgtcagctgtatgtgcaatcggcacttaagtcagttaaacaatcattttccatcgattcttctgataaattatatggatgacatactgatatgtcacagagatttacagttattacaagaagcatatcctatattaataaaaacgttagggaaatggggactgcaggtagccactgaaaaggtgcaagttgctcaaataggagccttcttagggtcactcatttatcccgacaaaattgttcctcaaagattagagattcgcagagatcatttacacaccttaaatgattttcaaaaattattaggagatataaattggctgagaccatttttaaagatttcctctgctgagttaaaacctttatttgacattttggaaggagagtctcatatctcctcccctagagcccttactcctgctgcaaatcaggccttgcagacagtagaaaaagctttgcaaaaggctcaattacaacgcattgatgagtcacaaccttttgatttgtgtgtctttaagacagcccagttgccaaccgcagtcttgtggcaaaatggacctttattatgggttcatccaaatgcatctcctgctaaaataatagattggtatcctaatgcagttgcacaacttgcgcttcgaggaataaaagcagctattacttattttggacaagatcctaaaatcctaattgtaccttatactgctgcacaggttcaaaccttggcagctacatctgatgattgggcagttttagtcacctccttttcaggacagattgacaaccattatcctaaacatccaattttacagtttgccctgaatcaggctatagtgtttccacaagtaacagctaaggacccacttacagatgggattgtggtgtacactgatggatcaaaaactggtataggtgcttatgtggttaataacgagatagtaactaagcaatataatgagacctcacctcaagttgtggaatgtttagtggtactagaggttcttaaggcattcccaggaccgcttaacattgtatcagattcctcctatgtagtaaatgcagttaacattcttgaaacagctggggtaataaaaccctccagcagagttgccaatatttttcgacaaatacagtttgttttattaaatagaaaattccctgtttatattactcatgttagggcacactcaggcctccctggtcctatgtctctgggaaatgatttagcagacaaagccactaaggttatagctgttgctctgtcttcccaggtaaaagcagcaaaagaatttcataagcgctttcatgtgacagctgagactttacgtcgccgctttgcattaactagaaaagaagctagagagattgttactcaatgtcacaattgttgtgaatttttacctgtccctcatgtggggataaaccctcgtggcgtcaggccattacaggtctggcaaatggatgtcacgcatatttcctcctttgggagaaatcaatatttacatgtttctattgacacctgctctggtgtaatgtttgccacacctttaacaggtgaaaaagcctctcatgttatacaacattgtctcgaggcatggagtgcttggggaaaacccaaactccttaagacagacaatggaccagcttacacctctcaaaaatttcaacagttctgtcgccagatggaagtgactcatctgactggtcttccgtataatcctcaagggcagggcattgtagaacgtgcccatcgcaccctcaagtcctaccttattaaacaaaaggggggaatccaggaagttctacccacagtgccaagagtagctgtttctatggcactcttcactcttaattttttaaaccttgatgctcaaggccatactgcggctgaacgtcactgttcagagcctgacaggccaaaagagatggtaaaatggaaagatgttttgactggtctctggaaaggcccggatcctatattaataagatccaggggagctgtttgtgttttcccacaggaagaagacaacccattctggctgccggaacgactgacacggagaattccgacacctgaagatgactcccagatggatcccttggaaactacctctagtcctcatgctacctctgtggatttgggttcctagtatatttggagagtatagatgggcaattctgtctgctttccctaagcccatgcctgttcgtcataatacagctgtttttcccaagttttttacgaccaataaaactttaggcctgccatacctaccatttgaccctatccgggcaccattgggagaaaaacgctctttaagggaacgaggttctctctgtttccaaatttatgaattaggaaattgtatcagactcaccagccgagctttgggaatgttttttaagtatcgaggaggcgtggtgaaaataacccaagacacttccaacagagatataacccttacaaatcggaccttctggcatgagacaacttgggttaatggtacatttctaccacctaacttttcagataaagaacgtcccaatcaaccaaaaatggctcctcattgtagcttggaagatgaagggctgatcctgccttggtctgattgtcaatcctctgtcactcgttgggcagatcagagtaaaactttttccttttctcccaacatgatagatgacccagagcagaaatatgttatgaaaaagggacttttcatacaggactttagaatgcatccttttcataaatgggtactttgtgggattaatggtagctgtacagatcttaatcccttggttttcctccaaggaggagctgctggaaaaacgatttttaatggtatttcgaaatttgctcagtttcatcaagttctgttacctgatagaaccatttatcaaaattctactactgaaatcactggatttaataagacactgataaagcagactaattatttacctactccggtttgtgtgtacacccctttcttgtttattctttctaatggttcctttgaatcctgtactaatgaaacctgctggatgtcacaatgctggagccttaagtgggccagccgtgcaatgcttgccaagattccacgatgggttcctgtccccgtggagatcccttccaccataaccttacacaggcaaaagcgagactttggtatcactgcagccgttgtggtggcaacggctgccagtgcggcggcagctacagctgctggaattgctatggcaacatcagtccagtcaagtacaactgtcgagcagttgtcctcctctgtggcagaggccatcgatcaacattcagcgctcagtgcccaattaaaaggtgggctaatgatagtgaaccagcgcattgacctggtggaggaaagactggaaattctgctccaattggctcagcttggctgtgataagaaatcaggagccttatgtattactagtgtccaatatgaaaattggacacatgcagctaatctatctaaagaattgtctttgtttcttacaggaaactggtccgaaggatttgacgaaaagcttgaggcgctacgtacagcagtgatgacgattaattctacgcgcgtggacccatcattgatcgatggaatcaaaggactttcttcctggatgtcctctgcattctcacattttaaagagtgggtgggagtgggcctgtttggcgcgaccctgtgttgtggactagtgtttcttctatggctggtatgcaaactcagatctcaacagaaacgtgacaaggtggtaattgctcaagcacttgctgccatagagcaaggcacctcccctgaaatttggctatctattctcaagaattagttggcatttgagttctctgtctttgcatcccacaaaattgtggatacattgcattgagatgagagaaactcaacgatcattgatcagyccgtgcacattgctgaggtttcctcattgcatgtgataaggtgatcatgatttccccactaattcatttttggctggcctcttttgtagagttcaccctaggccatttagcagttatagtcacacagcactgtggtatccaaagacgggcaactttcctcatgcacagaccaacctaagacaatggggcccggtggtgatagggttacccgataacgggtaaggctgtgacattggaggaacgacctaaaacaggggccacagcagatggacgtaactacataggcctagaccagcctcattttaataaattatagagggggaga

SEQ ID NO: 336 - DNA, 326 bp, mouse
tgtaaagggctgcaatctacgtgccgccactagatggtgctaaacctcattgtgcgcagctgcgagagcacagccagccaaagtcaccagtccatctccgaggcttttgcccaacccctgggggctttaacctatccccagggtgcatgaggatcatgggtgttgctaccagtcctagtttagacacgtcaccaaaagtatttaagccacacactttctgagctttctttgtctacctcaatatgatatagaagtaaaagttaaccgtggaagaatctggtgtgtcctgtgtttatttcccgcgggacggggataagctcgggata

SEQ ID NO: 337 - DNA, 3574 bp, mouse
attggtgccgaaacccgggaactgccttaccatcgccggcaccgaggagaccctccgttcgcggggcggattcagaactgcagtcaggttggtttttttttttaaggttctgagaggcatgtttggttctggtctttctctacaattagaaggggcaatggaagcctttgtaattgtttttgcagcacttatccttttccttatagtgaaagcaggacagggagtgctggaggaggttcaagacagcatgtcagaaacagagcggggtaaaagattgggagctcaaagaaaaaaaaaggtatacctaagaaacaaggcccttccaaggattctggatccgaggaagagagagaaaagggaaaggacgccctgggagagaaaaaggagaagggagagagaaagaggaggaaagataaaggggagaagagaaaaaagaaggggaaggagtcccccgagaggaagaacctttattcgttaaaagaacttgagggtttaggacttgatagctcaagttcaagtgaagaacttagtccctcggaggaagaagacttagaggaagaagcagcccactatggggaagaaagataccaccctgatgagggtagaaatagcgagccaaggaggaagttaaaaggaaatggtggtttaagtcagggcatggttcggtctccgggccctagcgcccctccaccttatgcagaaaatttctgctcagattcttttatccctcgagacgagcggcaaaaattacaacagatgtttcctatctttgaggcagcggatggaggacrcgttcacgcgtctgtggagcacatacagatcaaagaacttgctgagtcggtccgtaattatggagttagtgccaattttactttatctcaagtcgaaagacttgctactttggccatgactccgggagactggcaaatggtggcaaaggctgtgctcactaatatggggcagtatttagaatggaaagccttatggtatgacgtctctcaaacgcaagcaagggctaatgccgcagctgaaggtgatcagagaaattggacgtttgatctgctgacaggtcagggaccatatgcagctaatcagacaaattataattggggagcatacgctcaggtttcagctgctgccattaaggcatggaaagcactttcaaggaaaggaggggcaggaggacatctgacaaagattatacaaggacctcttactattgtgtctgattctgcttatgtggtgaatgcagttaatattcttgaagcagcagtattagtaaaatcctctagcagagttgctaactttttccaacaaatacagtctgacttaattaatagaagacatcctgtctacagaacccatattagggcacattcgggcctcccaggtccaatgtccaatggaaatgatttggctgataaagcaacaaagcttatagtcgcagcattgtcttcacagttagaaacagcaacagaatttcataaatgctttcatgtgacggctgaaactttaygccgccgatttaatttgactagaaaggaaggtagggaaattgtcattcaatgccaaaattgctgtggatttttgcctactcctcatgtgggaataaacccacatggtataagaccattacatgtctggcaaatggatgtcacacatatcccttcttttggaagaagtcaatacttacatgtgtcaattgatacttgttcaggcatcatgtttgccacaactttgacaggtgaaaaagcctcacatgtaatacagcactgcctagaggcatggagtgcttggggtaaacctaaaattcaaaaaattgacaatgggccagcttatgtttctaataagtttcaacaattttgccatcaagtgaatgtttcacatctgactggccttccttacaatccacaaggacaaggcattgtggaacgtgctcatcgcactataaatgcttatttaataaaacaaagaaggggaattgtggaagacgtgatatctccagtaccagagtagctgttttcatggcactctttactattaattttttaaatcttgatgagcatggtcactctgtggctgatcatcatagttcggagcccgatagaccaaaggaaatggtcaaatggaaaaatgtccttgataataaatgtatggcccggatcctattttaatcagatcccggggagctatttgtgtttttccacagggtgaacaaaatccacttcgggtcccgacgcgactgacaaggactgtgaaagagcaagatgaaccccaagatgatcctcttgctcctgatgattgagaccaggataagtatacctctgtgggccatagtaagatcatggccagtacctttaccggtacattccaattcttttaccttgcctttgttttttgcaaaggaatattttttggatgtgccttatgcacgacaaactcctcaagagccacgggtgtataagagtagattatctttaattgggcagcattactcccattaggtatattaatgattcttttattaagagtacagacctatcgaatcacctgaaggggaactggtcgcaggagctggaaaggttgcagacgcggctgcagatacagatcctgaacctcaatgggaccagagtggaaccagtgacccttggagattttacctcttggcttgtctctgtattttattattttaaggagtgggtgggggctatattgtttggcgcagccttatgttgtgggatagtgtttatgctatggttggtttgcaaactcagatctcaacagaaacgtgacaaggtcgttatcgctcaagcacttgcggccattgaacaaggggcctcccctgaaatttgttcggcatctgagttctctgctcttgcaccccatggatctgcggatccattgcactgggatgagagagactcaacgatcattgatcagcccttgcacattgctgaggtttcctcattgcacgtgacagggtgatcatgatttctccactaaaatttttccttaaaacctggctggccttgctcgtagagttcaccctaggccatctagcagttattgtcacacagcactgtggtatccagagacgggcaactttcctcgtgcacagaccaacctataatgctgcgttatgccatgggttgcgaggctaagcactgcacagaggatagcttgctgttggcatcctgtggaaggcacgtctgattgcatgaaggttcagtgtcctagtttccttcccccaggaaaaacgacacgggagctggccaagacctctctgggtgatgagcccaagggacggttttgtgtagggcccctatgcttgcacactggggatcagacctctaccttcacccatgaggcttgtttgcagcaatcaaaatctggccatagattaatcaacatcctggccttttgatgcacctgccacatgcagacaggagagctgygcaggtgtataggtaaggctgtgacattagaggaacgacctaaaacaggggccacagcagatgggcgtaactgcagaggcctagaccagcctcgttttaataaaacaaaaagggggaga

SEQ ID NO: 338 - DNA, 7513 bp, mouse
agtggtgccaaaacccgggaactgtcatcacaccagcgcaaggaagaccctcattcacggggcagaatcagaactgtgggacaaaaggctctacaaggtacgtacaatcttgaaatttctccagagttagaagcccttttgattgtttgcatggcgattacgcttttccttttggtttcgttttgtttccaccactggaactgttgactgtttcttagtcgcagtcagtcctggacagcgcctggacagcaaccaatttcaggcccggtcaggcctggacagcggcagtatgggaatctcccattctatagtagtgggcttacgctcagtcctgaagcagtgtggcctaaaaatcgccactaagacctaagagggatttgtcagagagatagaccgtgttgcaccatggtatgcttgctcattgtcattaactgtcgcctcttgggacaaactgaaaggagatctagttaggaaacagcagaatggcaaacttaaagcagggattatgctgctatgaaattggtgaaatcatgtttaacagatgaggattgtcagcaaatgttagaagcagggcagaaagttctggacgaaattcaagaaagtctatcagaggtagatcagggagagagagtaaaaatagagaggaaacaaagtgcactgaagaatttaggcctttccatgagccttgagaccgaggaaaagagaatgtcagggaaaatacctggggagagattagaaaaagggatggaaagggagagaagaagggagatcgagctggagaggcacataaggaaagaagcctctacccaccactagatgagtttaagcagctagctgtcagtagctcagaatcagataaggaacttagctcctatgaggaaacagacttagagaagaagcgacaggttgtgagggagaaagataccagtcagatgaaagacgagttaatcagttacagataacatgaaagcagctagagacaaatgtcaaatcattgcgcagtcttcggatatgcaaattcagggttctagtgcacctccgccttatgtgcagaggcaccattctgagccttatgtgcagaggtatcattcagactcatttatactaaaagaggaacagaggaagatacaacaggcatttccagtttttgaaagagctgagggaggggctgttcacgctcaagtagaatatatacagattaaggagcttgcagaaacagtccgtgttatggagtcagagctaatttcactgtagcacaagttgaaaggcttgcaactcacactatgactcctggtgattgccagactgtagtaaaagctgcagcccccagtatggggatgtatcttgaatggaaagttttgtggcaggactcctgtcagacgcaggcaagggccaatgccaccatggaaggaaaccaaaggacatggacatttgaattgcttacaggtcagggacagcatgctgctaaccaaacagattattattggggagcatacgcccagatctcagctgccgctgttaaggcatgtaaggcactctctaagaagggagaggcaagtgggcatttgaccaagatcattcaggtctaccaggagtcatactcaatttttgtggctagaatgacagaggcagcagggagatattttgagatacaaaagcagctatgcctttaattgaacagttgatatatgaacaggctacccaggaatgcagggcagctattacacctggaaaaagcaagggactgcaggactggtcgaaggtttgccgtgaacttggtgggccactcactaatgcaggtttagcagctgccattctacaagtgcaaaaatgccctgacatggctgagctcaaactctgctataacgtggcaaaccgggacacttaaaaaaggactgtagagcccttgataaaaggagagtaccaggattgtgcactaagtgtggaaaaggatatcattgggctagcgcttgtcgttcaatcagggacattcgaggcaggctcctgcagccaggattccctcaagcagtagataatgacaccatttcaaaaaaccattacagggccctcaggtcttagggccgaaaacatacggaccacgacaggcgaaaggtggagcccacagtccgcaggcaacagaaggctcagctggattggacctccgtaccaccacccaattcatcgtgatcctcaaatgggagagcagcctattcctactgactctaaaggacctctgccactcctgggagtgtcggcctaatattgggcagggcttcccttacactacaaggtcttattgttcaccctggagatgtaggtcaagattatgaagggggacttcaagttctctgttcctgtcctcagggtgtcgtttctatttcacaaggagatagaatagctcagttagtaattcagccaagcctacatggctgttttccctcttctggtgtccctcaagctaccagagggattggttctactggaaatgattcggcctatttaattatgcctttagattccaggccttctttagagttagttatagaagggaaacaatttaaggggattttaggcacagcagcagacaaaagtattatttcttctcactggtggccgaaaacttggccagttattcagtcatcacattctttgcaaggtttcggttatcagtcctgtcccactattagttcccgttctttgagctggacagcgcctgaaggtcaaatgggatgattcactccttatgtcataccactcccagtaaatctctgggggaaagacatcttacaggacactaggactgaccttaactaatgcatgctcgccacaagtcgttcgtaagattaagaaaatatgctataaagaaggaaggggattaggaaaaggagagcagggtaaacttgaacctatccctcaaaaaggtaataatgggagacaaggtttggattttttctagagacagctgttgagggttccatgcccataccatggcttacagaggaagttgtatgggttccccaatggcctctctcctctgaaaaattagaagcagccacaaaactaatttctgaacagctacacttggggcatttagagccttctaactcaccctggaatacacctattttcgtaattaagaaaaaatctggcaaatggcgcttattacatgatcttagagcaattaatgcgcaaatgcatctatttggaccagttcagcaagggctaccattactttctgccttacccaaaaattgggaaattataatcctagacattaaaaattgctttttctctatacctttatgccctcaagataggcaaagatttgcatttacgatcccagccattaattacttagagccagatcaaaaataccaatggaaggtcctacctcaggggatggcgaatagcccaccatgtgtcaactgtatgtacaattggcacttaagtcagttagagaacattttccatcattacaggtgataatttatatggatgacattttgatttgccataaaaattcagagttattgcaagatgcataccttatattaataaaaacgttagggcaatggggattgcaggtggccaccgaaaaggtgcaagttgctcgaatgggagccttcctagggtcacttatttatcctgacaaaattgttcctcaaaaattagagattcgcaaagatcaactacataccttgaatgattttcaaaaattgttaggagatattaattggctgagaccctttttgaaaattccatcagcagaattaaagcccttatttgacatattagagggagatacccatatctcctcccacagagcacttacctcagctgcatgtcaagctttacaaattgtagaaaaggccctacaagatgctcaattacacgcattgacgagtcaaagtcatttgaattgtgcatattaaaaactgcacagttaccaacagtggtcttatggcaaaatgggcccttgttgtgggtccatcctaatgcttcccctgcaaaaatcattgagtggtatcctaatatgccagttgctcaacttgcacttagggggataaaagcagccattacttatttcgggtaagaaccttatatagtaagtgtaccttatacttctgctcaagttcaaaccctggcagcaacaaccaacgattgggcagtcttggttgcctcctattcaggacaaattgataaccattatccaaaacatacaattttacaatttgccttaagccaagctatagtgtttccaataataacagtcaaacacccacttccggatggggtagtagtgtatagagatggatccaaatctggtataggtgcatatgtagtaaatggccaagtaacatctaaacaatataatgattcatcaccccatgttgtagagtgtttggtagttctagaagtccttgaaactttcctgggaccgctcaatattgtatctgattccttatatgtgttcaatgcagttaatatgcttgaagttgcaggcttaattaaaccaactagtaagcttgctcacatttttcaaaagattcagtcagccttgtatacagaagacacttgtctatattactcatgtttgaggtcattctggccttcctggcctcatgtctcatggaaatgacttagcaaacaaagccactagaatcgtggctgctgctttgtcctcacaggcagaggctgcaagagaatttcatgaatgctttcatgtgacacctgagacattacaccaccgttttaatttaaccaggaaagaatctcgtgacattgtcacccaatgtcgaaactgttgtcaatttttacctactcctcatgtaggggtaaaccctcgtggcgtcaggacattacaggtctggcaaatggatgtcagtcatatttcctcctttgggagaaatcaatatttacatgtttctattgacacctgctcttgtgtaatatttgccacacctttaacaggtgaaaaagactctcatgttatacagcattgcctagaagcgtggagtgtgtgggcaagccacaattctaaaaacggataatgagccagtcatataattctacttaatttcaacaattttgtcatcaaatggatgtcactcatttgactggccttccttataatactcaaggacaaggcattgttgaacgtgcccaccccaaactcaaatcttataaaacagaaagagggagttgatgagactctgacctcagtgccaagagtagcagtatctatggcactctttacacttatttttttgaatctcgacgagcagggacactctgcagctgagcgacatagctcagaccctgatagaccaaaagaaatggtcaaagggaaggatgttttaactggtcagtggaaagcgccggatcctatcttaatcagatcctggggagctgtttgtgttttttcacagagttaagacaacccattttgactgacggaatgactcatccccaggatattcatcaaggatggtgcagaagatgctgacctcccgaggactgttcctgatcctgacaatgctgaacttgtctcaggttcctagtataatgggccagcagagatgggctattctctcaactttccctaaaccaatgccagttcgctatgatgctatagtttttccaaaattctttactactgataaaacagtggatttgccatattaccctatgatcccaacccgagcaccattaggagaaaatcgcactttactagaacatggttctttatgttttcgaattaatggaccaggaaattgtatcaacctcacagcctgagctttggggaagtttaatgagcatagaggaggttgcgtgacacaacccaagatacttccaatgtagagataaccgttacaaatcggaccttttggcacgacctaaattgggttaatggtacatttctaccacctaacttttcagacaaaaaacgtccacaccaaccaaaaatagcccctcattgtagtttggaagatgaagggctgatcctgccattgtctgattgtcaatcctccatcactcattgggcagatcagagtaaaaccttttccttttctcccaacatgatagataacccagagaaggaatttgttatgaaaaagggacttttgatactggacattagaatgcatccctttaacaagtgggtgctttgtggagtcaatggcagttgtacagaactcaatcctttgatcctttatccagggaggagcagttggaaaggcttcttttactggcatctcaagatttgctcagtattggggaatacatgatgcctccctggactcttatggatatagtaataccagatgcagagatcactgggtttaataaaactttggtaaaccagattaattatccatctaccacagtctgtgtttaccccgctttcttgtttattctttcaaatgattcatttgaaatctgttccaatgataattgttggatttctcaactttgggtagtaacaaagaacaccgtgccatggtggcacggatcccacgttggatctctgttctggtggatacaccctccatcttatctatgttttgaaaaaagagagattttggcattactgctgccgtgatcatagcaatttcagccagtgcagctgctgctacagctgcagggtatgctatggttagtgcggttcaatcaggcacaaaattaaatcagctttcagcagatctggctgatgccatcactgtccaagcttctgctagtaccaagttaaagggagggctgatgactttgaatcagtgccttgacctggcggaagaacagataggtgttctatgaagatggcccagttgggttgtgaaagaaaactggaagctctgtgcattaccagtgtccaatatgaaattttacttatgcagctaatttgtctagacaggtttctttatatcttgcaggaaacttgtctgaaagattcgatgagacccttgaggtccttagagcggccgttctaaagatcaactcaacacgagtggacctgtcattgacagaggtcctctcctcctggatttcactgccttttcttattttaaagaatgggtgggggtaggtttatttggcgttgcacctgctgtggacttgtggtcatgctctggttggtttgcaagctcagaacccaacaaacacgtgacaaggttttgataacccaagcacttgctgccatcaagcaaggggccttccctgaaatctggctatctatgctcaaaaattaattgacattggtggctgtcctcttttatagagttcgccctagtttatttagtagttaatgtcacatagcactgtggtatccagggaggggcaactttcctcatgcacagatcaacctaagacacagggcccggtggcgatagggttaccctatgcacggaaaggctgtgcacttggaggaatgacctaagacaggagccacagtggatgggcaaagttacacaggcctagaccagcctcaagttttaataaaataaaaaggggaaga

SEQ ID NO: 339 - DNA, 6481 bp, mouse
attaagaattggtgccgaaatccgggacgagaaaaaatccgggacgaaaaaatacaagaaaactcgggaaccggcgcaaggaagatccctcattccagaaccagaactgcgggtcgcggtaataaaggttcccgtaaagcagactgttaagaaggattcaactgcatgaattcagaacttttcagctggggaacgagagtaccagtgagtacagctttacaaggtaagtctggtcttgaactttctaaggaaattcaagacagtctatcagaagtaaagtggaaaatagctttacaaggtatgtttggccttgaattttttctagtgttaggagcccttttgttccttttcacatgttatcaagtgattaagatagggctgaaaattctggatgaaattcagggcaatctatcagaagtaaagcggggagagagagtaggagcaaagagaaaatatggtacacaaaataagtatacaggcctttccaagggtcttgaacccgaggaaaagtttaggtcaggtaagaatacctggggagagattagaaggaaggaaaagaaaaaagaaaagaaaaaagatcaattagcggaggtctctaggagatactcgtcactagatgagctcaggaagccagctcttagtagctctgaagcagatgaagaattctcctctgaggaaacagactgggaggaagaagcagcccattaccagccagctaattggtcaagaaaaaagccaaaagcggctggcgaaagccagcgtactgttcaacctccgggcagtcggtttcaaggtccgccctatgcggagcccccgccctgcgtagtgcgtcagcaatgcgcagagaggcaatgcgcagagaggcaatgcgcagagaggcagtgcgcagagaggcagtgcgcagagaggcagtgcgcagagaggcagtgcgcagactcattcattcccagagaggaacaaaggaaaatacaacaggcatttccagtctttgaaggagccgagggtgggcgtgtccacgctccggtagaatacgtacagattaaagaacttgccgagtcggtccgtaaatacggaaccaatgctaattttaccttggtgcagttagacaggctcgccggcatggcactaactcctgctgactggcaaacgattgtaaaagccgctctccctagtatgggcaaatatatggaatggagagcgctttggcacgaagctgcacaagcgcaggcccgagcaaacgcagctgctttgactccagagcagagagattggacttttgacttgttaacgggtcagggagcttattctgctgatcagacaaactaccattggggagcttatgcccaaatttcctccacggctattagggcctggaaggcgctctcccgagcaggtgaagccactgggcagttaacaaagataatccagggacctcaggagtccttctcagattttgtggccagaatgacagaggcagcagagcgtatttttggagagtcagagcaagccgcgcctctggtagaacagctcatctatgagcaagccacaaaggagtgccgagcggccatagccccaagaaagaacaaaggcttacaagactggctcagggtttgtcgagagcttgggggacctctcagcaatgcaggtttagcggctgccatccttcaatcccaaaaccgctccatgggcagaaataatcagaggacatgttttaactgcggaaagcctgggcattttaagaaagattgcagagctccagataaacagggagggactctcactctttgctctaagtgtggcaagggttatcatagagccgaccagtgtcgctctgtgagggatataaagggcagaatccttcccccacctgatagtcaatcagcttatgtgccaaaaaacgggtcatcgggccctcggtcccagggccctcaaagatatgggaaccggtttgtcaggacccaggaagcagtcagagaggcgacccaggaagacccacaagggtggacctgcgtgccgcctccgacttcctattaatgcctcaaatgagtattcagccggtgccagtggagcctataccatccttgcccccgggaaccatgggccttattctcggccggggttcactcaccttacagggcttagtagtccaccctggagttatggattgtcaacattcccctgaaatacaggtcctgtgctcaagccctaaaggcgttttttctattagtaaaggagataggatagctcagctgctgctcctccctgataataccagggagaaatttgcaggacctgagataaagaaaatgggctcctcaggaaatgattctgcctatttggttgtatctttgaatgatagacctaagctccgccttaagatcaacggaaaagagtttgaaggcatccttgataccggagcagataaaagtataatttctacacattggtggcccaaagcatggcccaccacagagtcatctcattcattacagggcctaggttatcaatcatgtcccactataagctccattgccttgacgtgggaatcctctgaagggcagcaagggaaattcataccttatgtgctcccactcccggttaacctctggggaagggatattatgcagcatttgggccttattttgtccaatgaaaacgccccatcgggagggtattcagctaaagcaaaaaatatcatggcaaagatgggttataaagaaggaaaagggttaggacatcaagaacagggaaggatagagcccatctcacctaatggaaaccaagacagacagggtctgggttttccttagtggccattggggcagcacgacccataccatggaaaacaggggacccagtgtgggttcctcaatggcccctatcctctgaaaaactagaagctgtgattcaactggtagaggaacaattaaaactaggccatattgaaccctctacctcaccttggaatactccaatttttgtaattaagaaaaagtcaggaaagtggagactgctccatgacctcagagccattaatgagcaaatgaacttatttggcccagtacagaggggtctccctgtactttccgccttaccacgtggctggaatttaattattatagatattaaagattgtttcttttctatacctttgtgtccaagggataggcccagatttgcctttaccatcccctctattaatcacatggaacctgataagaggtatcaatggaaggtcttaccacagggaatgtccaatagtcctactatgtgtcaactttatgtgcaagaagctcttttgccagtgagggaacaattcccctctttaattttgctcctttacatggatgacatcctcctgtgccataaagaccttaccatgctacaaaaggcatatccttttctacttaaaactttaagtcagtggggtttacagatagccacagaaaaagtccaaatttctgatacaggacaattcttgggctctgtggtgtccccagataagattgtgccccaaaaggtagagataagaagagatcacctccataccttaaatgattttcaaaagctgttgggagatattaattggctcagaccttttttaaagattccttccgctgagttaaggcctttgtttggtattttagaaggagatcctcatatctcctcccctaggactcttactctagctgctaaccaggccttacaaaaggtggaaaaagccttacagaatgcacaattacaacgtattgaggattcgcagcctttcagtttgtgtgtctttaagacagcacaattgccaaccgcagttttgtggcagaatgggccattgttgtggatccatccaaacgtatccccagctaaaataatagattggtatcctgatgcaattgcacagcttgcccttaaaggcctaaaagcagcaatcacccactttgggcgaagtccatatcttttaattgtaccttataccgctgcacaggttcaaaccttggcagccacatctaatgattgggcagttttagttacctccttttcaggacaaatagataaccattatccaaaacatccaattttacagtttgcccaaaatcaatctgttgtgtttccacaaataacagtaagaaacccacttaaaaatgggattgtggtatatactgatggatcaaaaactggcataggtgcctatgtggctaatggtaaagtggtatccaaacaatataatgaaaattcacctcaagtggtagaatgtttagtggttttagaagttttaaaaacctttttagaaccccttaatattgtgtcagattcctgttatgtggttaatgcagtaaatcttttagaagtggctggagtgattaagccttccagtagagttgccaatatttttcagcagatacaattagttttgttatctagaagatttcctgtttatattactcatgttagagcccattcaggcctacctggccccatggctctgggaaatgatttggcagataaggccactaaagtggtggctgctgccctatcatccccggtagaggctgcaagaaattttcataacaattttcatgtgacggctgaaacattacgcagtcgtttctccttgacaagaaaagaaggcccgtgacattgttactcaatgtcaaagctgctgtgagttcttgccagttcctcatgtgggaattaacccacgcggtattcgacctctacaggtctggcaaatggatgttacacatgtttcttcctttggaaaacttcaatatctccatgtgtccattgacacatgttctggcatcatgtttgcttctccgttaaccggagaaaaagcctcacatgtgattcaacattgtcttgaggcatggagtgcttgggggaaacccaaactccttaagactgataatggaccagcttatacgtctcaaaaattccagcagttctgccgtcagatggacgtaacccacctgactggacttccatacaaccctcaaggacagggtattgttgagcgtgcgcatcgcaccctcaaagcctatcttataaaacagaagaggggaacttttgaagagactttaccccgagcaccaagagtgtctgtgtctatggcactctttacactcaattttttaaatattgatgctcatggccatactgcggctgaacgtcattgttcagagccagataggcccaatgagatggttaaatggaaaaatgtccttgataataaatggtatggcccggatcctattttgataagatccaggggagcggtctgtgttttcccacagaatgaagacaacccattttggataccagaaagactcacccgaaaaatccagactgaccaagggaatactgatgtccctcgtcttggtgatgtccagggcgtcaataataaagagagagcagcgttgggggataatgtcgacatttccactcccaatgacggtgatgtataatgctcaagtattctcctgcttttttaccactaactaggaactgggtttggccttgattcagacagccttggctctgtctggacaggtccagacgactgacaccattaacactttgtcagcctcagtgactacagtcatagataaacaggcctcagctaatgtcaagatacagggaggtctcatgctggttaatcaactcatagatcttgtccagatacaactagatgtattatggcaaatagctcagctgggatgtgaacaaaagtttccgggattgtgtgttacttccattcagtatgttaaatttactagggcagctaatttgtcaaaaagtctttttcagtatatgttacagaattggacggctgaatttgaacagatccttcgggaattgagacttcaggtcaactccacgcgcttggacctgtccctgaccaaaggattacccaattggatctcctcagcattttccttctttaaagaatgggtgggattgatattatttggagatacactttgctgtggattagtgttgcttctttgattggtctgtaagcttaaggcccaaactaggagagacaaggtggttattgcccaggcgcttgcaggactagaacatggagcttcccctgataatatctatgcttaggcaataggtcgctggccactcagctcttatatcccatgaggctagtctcattgcacgggatagagtgagtgtgcttcagcagcccgagagagttgcacggctaagcactgcagtagaagggctctgcggcataatatgagcctattctagggagacatgtcatctttcaagaaggttgagtgtccaagtgtccttctctccaggcaaaacgacacgggagcaggtcagggttgctctgggtaaaagcctgtgagcctaagagctaatcctgtacatggctcctttacctacacactggggatttgacctctatctccactctcattaatatgggtggcctatttgctcttattaaaaggaaagggggaga

SEQ ID NO: 340 - DNA, 367 bp, mouse
tgttgggagccgcgcccacattcgccgttacaagatggcgctgacagctgtgttctaagtggtaaacaaataatctgcgcatgtgccaagggtatcttatgactacttgtgctctgccttccccgtgacgtcaactcggccgatgggctgcagccaatcagggagtgacacgtccgaggcgaaggagaatgctccttaagagggacggggtttcgttttctctctctcttgcttcttgctctcttgcttcttgctctcttgcttcttgcactctggctcctgaagatgtaagcaataaagctttgccgcagaagattctggtctgtggtgttcttcctggccggtcgtgagaacgcgtctaataaca

SEQ ID NO: 341 - DNA, 337 bp, mouse
tgttgggagccgcgcccacattcgccgttacaagatggcgctgacagctgtgttctaagtggtaaacaaataatctgcgcatgtgccgagggtggttctccactccatgtgctctgccttccccgtgacgtcaactcggccgatgggctgcagccaatcagggagtgacacgtcctaggcgaaggataattctccttaatagggacggggtttcgttttctctctctcttgcttcttgcactctggctcctgaagatgtaagcaataaagctttgccgcagaagattctggtctgttgtgttcttcctggccgggcgtgagaacgcgtctaataaca

SEQ ID NO: 342 - DNA, 475 bp, mouse
tgtggggagccgccctcacattcgccgttgcaagatggcgctgacatcctgtgttctaagtggtaaacaaataatctgcgcatgtgccaagggtagttctccaccccatgtgctctgccttccccgtgacgacaactcggccgatgggctgcagccaatcagggagtgatacgtcctaggcggaggataattctccttaaaagggacggggtttcgccattctctctcttgctctcttgcgctcttgctctcttgctctgctcttgcgctctggctcctaaagatgtaagcaatagagctcttgctctgcgctcttgcgctcttgcgctcttgcgctctggctcctaaagatgtaagcaatagagctcttgctctcttgctctctggctcctgaagatgtaagcaataaagctttgccgcagaagattccggtttgttgcgttcttcctggccggtcgcgagaacgcgtgtaaga

SEQ ID NO: 343 - DNA, 444 bp, mouse
tgtggggagccgccctcacatttgccattataagatggcgctgacagctgtgttctaagtggtaaacataatctgcacacgtgcaggggcagttttcccgccatgtgttctgcctttctcgtgatgacaactgggccgatgggctgcagccaatcagggagtaatacgtcctaggcggaggataattctccttaaaagggacggggttttgccattttctctctcttgctttcttgttctctctcttgctttcttgttttctcgttcttgctctcttgctttcttgttcttgttctttttcttgctttcttgctctctcttgctctcttgctctcttgctctcttgctctctggctcctgaagatgtaagcaataaagcttttgccgcagaagattccggtttgttgcgttctttcctggccggtcgcgagaacgcgtgtaaga

SEQ ID NO: 344 - DNA, 327 bp, mouse
tgtggggagccgccctcacattcgccgttacaagatggcgctgacatcctgtgttctaagtggtaaacaaataatctgcgcatgtgccaagggtagttctccactccatgtgctctgccttccccgtgacgacaactcggccgatgggctgcagccaatcagggagcgacacgtcctaggcggaggataattctccttaaaagggacggggtttcgccattctctctcttgcttcttgctcctgaagatgtaagcaataaagcttttgccgcagaagattccggtttgttgcgttcttcctggccggtcgcgagaacgcgtgtaaga

SEQ ID NO: 345 - DNA, 326 bp, mouse
tgtgaggagccgccctcacagtcgccgttacaagatggcgctgacatccgttgctcgtagtaaaatgtgcgcaggcgtcagggtatcgttccattacctgagccctgcctttctcgtggcgttaactgactgatagtgggcagccaatcccagtggtgcacatctccaaccgttttttcgcagcctataaaagggaagggttttctgctctctgggtctcctctcctgaagctgatcatctatctctcgagatgtattaaagctgtactgcagaaggatccgagtggcctgcgtgcgttttgctggcgagacggtagcgtgggtca

SEQ ID NO: 346 - DNA, 345 bp, mouse; identical to SEQ ID NO: 328
  misc_feature (169)..(169): n is a, c, g, or t
  misc_feature (330)..(330): n is a, c, g, or t

SEQ ID NO: 347 - DNA, 1470 bp, mouse
cgaaacattacaaggacaagaagtggcgctgataacccgggaactatatcatcaccaggcgctgataggagacccccccccgtttcacggggcagattcagaactacgggacaatacagctctacaaggtatggccttgaactttctccagcgttagaagcctttctgttccttttcacagggctcgttctttttctttagattgcgtacagtttccacaggaggaattgctaactagtgttcagtcgaggtcaggcaaggttagaacaaaggcaagaagatagcatgggagcctcccactctgtggtgaccgccttacggtcggtcctgaggcagcgtggcttgaaagtctccaccaagacactagaaggctttgtaaaagagatagatcacatagcaccgtggtttgcgtgctcagggtccttaactatcccctcttgggagaaactcaggggagatttagttggggagcaggagaacggcaaacttaaagcaggaaccatgccgttgtggaagctgattagatcgtgcttaaagaacgaggaatgtcaacaagtagttaaggcagggcagaaaattctggacgaaattcaagaaagcctatcagaggtagagcggggagctagagagtaggagccaaaggggaaacatggtgcaccaaataagcatacaggcctctccacgggtcttgaacctgaggagaagataatgtcggggaaggatacccggggagagataagaagaaaggaggagaaaaaacaaaagaaaaaaagatcaatcagcggaggtccctagaggagggagcctatacccgccgctagatgagtttaaggagttagctcttagcagctcagaatcagatgaagaacttagcccctctgaggaaacagacttggaggaggaagcagctcgttatgagagagaaaagtaccagccagataaaatgcgagctaatcagtcaagaaaaaagccaaaagcggctggcgaaggccagcttgctgctcggcctccgggcagtcggcttcaaggtcatagtgcacctccgccctatgcggagcccccgccctgcgtagtgcgtcagccctgcacagagaggcagtgcgcagagaggcagtgcgcagactcgttcattccaagagaggaacaaaggaaaatgcaacaggcatttccggtctttgaaggagccgagggtgggcatgttcacgctccgggtagagtatatacagattaaagagcttgccgagtcggtccgtaactatggagtcagtgctaatttcactgtggcacaggtcgaaaggcttgtggccttggcaatgactcccggggactggacaacggtgataaaagctgtggctccaaatatgggaatgtatcttgaatggaaagcattgtggcaagatttctgccagacgcaagcaagggctaatgctaccatggagtgaaaaaggagaaaagagaaaaacaaaagat

SEQ ID NO: 348 - DNA, 224 bp, mouse
ggggctggggatgtagctcagttggtagagcgcttgcctagcatgcgcgaagccctgggttcgatccccagcaccgcataaaaccgggcgtggtggcgcacgcctgtaatcccagcactcgggaggtggaggcaggaggatcagaagttcaaggtcatcctcggctacatagcgagttcgaggccagcctgggctacatgagaccctgtctcaaaaaaaaaaaa

SEQ ID NO: 349 - DNA, 96 bp, mouse
ggggctggggatttagctcagtggtagagcgcttacctaggaagcgcaaggccctgggttcggtccccagctccgaaaaaaagaaccaaaaaaaaa

SEQ ID NO: 350 - DNA, 96 bp, rat
ggggttggggatttagctcagtggtagagcgcttgcctagcaagcgcaaggccctgggttcggtccccagctccgaaaaaaagaaaaaaaaaaaaa

SEQ ID NO: 351 - DNA, 83 bp, rat
ggggctggggatgtagctcagtggtagagcgcttgcctagcatgcgcgaggccctgggttcgatccccagcaccgcaaaaaaa
